(19) United States
(12) Patent Application Publication
(10) Pub. No.: US 2020/0399383 A1
(43) Pub. Date: Dec. 24, 2020

(54) CHIMERIC ANTIGEN RECEPTOR THERAPY IN COMBINATION WITH IL-15R AND IL15

(71) Applicants: Novartis AG, Basel (CH); The Trustees of the University of Pennsylvania, Philadelphia, PA (US)

(72) Inventors: John Scholler, Narberth, PA (US); Carl H. June, Merion Station, PA (US)

(21) Appl. No.: 16/969,381

(22) PCT Filed: Feb. 13, 2019
(86) PCT No.: PCT/US2019/017853

§ 371 Date: Aug. 12, 2020

Related U.S. Application Data
(60) Provisional application No. 62/630,109, filed on Feb. 13, 2018.

(51) Int. Cl. C07K 16/28; A61P 35/00; C07K 16/24; C12N 15/86

(52) U.S. Cl. CPC C07K 16/2866; A61P 35/00; C07K 16/2878; C12N 15/86; C07K 16/244

(57) ABSTRACT

The invention provides compositions and methods for treating diseases such as cancer. The invention also relates to a method of administering a therapy comprising a chimeric antigen receptor, an IL-15R molecule and an IL-15 molecule.

[0001] This application claims priority to U.S. Ser. No. 62/630,109 filed Feb. 13, 2018, the entire contents of which are herein incorporated by reference in its entirety.

### SEQUENCE LISTING

[0002] The instant application contains a Sequence Listing which has been submitted electronically in ASCII format and is hereby incorporated by reference in its entirety. Said ASCII copy, created on Feb. 8, 2019, is named N2067-7151WO_SL.txt and is 1,064,338 bytes in size.

### FIELD OF THE INVENTION

[0003] The present invention relates generally to the use of cells engineered to express a chimeric antigen receptor, in combination with an IL-15R molecule and an IL-15 molecule, to treat a disease such as cancer.

### BACKGROUND OF THE INVENTION

[0004] Recent developments using chimeric antigen receptor (CAR) modified T cell (CART) therapy, which relies on redirecting T cells to a suitable cell-surface molecule on cancer cells, show promising results in harnessing the power of the immune system to treat cancers (see, e.g., Sadelain et al., Cancer Discovery 3:388-398 (2013)).

[0005] Given the ongoing need for improved strategies for targeting diseases such as cancer, new compositions and methods for improving CART therapies are highly desirable.

### SUMMARY OF THE INVENTION

[0006] This disclosure features, at least in part, compositions and methods of treating disorders such as cancer using immune effector cells (e.g., T cells or NK cells) that express a chimeric antigen receptor (CAR) molecule, e.g., a CAR molecule that binds to a tumor antigen, e.g., an antigen expressed on the surface of a solid tumor or a hematological tumor. In one aspect, the invention features use of the CAR-expressing cell therapy in combination with an Interleukin 15 receptor (IL-15R) molecule, and/or an Interleukin 15 (IL-15) cytokine molecule. In some embodiments, disclosed herein, inter alia, is a composition comprising a CAR molecule co-expressing an IL-15R molecule and an IL-15 molecule, and uses thereof. In some embodiments, the CAR molecule, the IL-15R molecule and the IL-15 molecule are disposed on a single nucleic acid molecule. In some embodiments, the CAR molecule, the IL-15R molecule and the IL-15 molecule are disposed on separate nucleic acid molecules. Without wishing to be bound by theory, it is believed that in some embodiments, a CAR cell co-expressing an IL-15R molecule and an IL-15 molecule (“CAR IL-15R/IL-15 expressing cell”), has enhanced expansion and proliferative capacity. In some embodiments, a CAR IL-15R/IL-15 expressing cell has improved efficacy.

[0007] In one aspect, disclosed herein is a nucleic acid molecule, e.g., an isolated nucleic acid molecule, comprising:

[0008] (i) a first nucleic acid sequence encoding a chimeric antigen receptor (CAR) molecule that binds to an antigen (e.g., an antigen described herein, e.g., CD19, Mesothelin or BCMA);

[0009] (ii) a second nucleic acid sequence comprising an IL-15 receptor (IL-15R) molecule; and

[0010] (iii) a third nucleic acid sequence comprising an IL-15 molecule.

[0011] In some embodiments, the first nucleic acid sequence, second nucleic acid sequence and third nucleic acid sequence are disposed on a single nucleic acid molecule, e.g., a vector, e.g., a viral vector, e.g., a lentivirus vector.

[0012] In some embodiments, the first nucleic acid sequence, second nucleic acid sequence and third nucleic acid sequence are disposed on separate nucleic acid molecules, e.g., separate vectors, e.g., separate viral vectors, e.g., separate lentivirus vectors. In some embodiments, the first nucleic acid sequence is disposed on a first nucleic acid molecule, e.g., a first vector, e.g., a first viral vector, e.g., a first lentivirus vector. In some embodiments, the second nucleic acid sequence is disposed on a second nucleic acid molecule, e.g., a second vector, e.g., a second viral vector, e.g., a second lentivirus vector. In some embodiments, the third nucleic acid sequence is disposed on a third nucleic acid molecule, e.g., a third vector, e.g., a third viral vector, e.g., a third lentivirus vector.

[0013] In some embodiments, the first nucleic acid sequence and the second nucleic acid sequence are disposed on a first nucleic acid molecule, e.g., a first vector, e.g., a first viral vector, e.g., a first lentivirus vector. In some embodiments, the third nucleic acid sequence is disposed on a second nucleic acid molecule, e.g., a second vector, e.g., a second viral vector, e.g., a second lentivirus vector.

[0014] In some embodiments, the first nucleic acid sequence and the third nucleic acid sequence are disposed on a first nucleic acid molecule, e.g., a first vector, e.g., a first viral vector, e.g., a first lentivirus vector. In some embodiments, the second nucleic acid sequence is disposed on a second nucleic acid molecule, e.g., a second vector, e.g., a second viral vector, e.g., a second lentivirus vector.

[0015] In some embodiments, the first nucleic acid sequence is disposed on a first nucleic acid molecule, e.g., a first vector, e.g., a first viral vector, e.g., a first lentivirus vector. In some embodiments, the second nucleic acid sequence and the third nucleic acid sequence are disposed on a second nucleic acid molecule, e.g., a second vector, e.g., a second viral vector, e.g., a second lentivirus vector.

[0016] In some embodiments, the nucleic acid molecule comprises a multicistronic lentivirus vector.

[0017] In some embodiments, the single nucleic acid molecule has the following arrangement in an N- to C-terminal orientation:

[0018] (i) the first nucleic acid sequence-a first linker-the second nucleic acid sequence-a second linker-the third nucleic acid sequence; or

[0019] (ii) the first nucleic acid sequence-a first linker-the third nucleic acid sequence-a second linker-the second nucleic acid sequence,

[0020] wherein the first and second linkers are different.

[0021] In some embodiments, the single nucleic acid molecule has the following arrangement in an N- to C-terminal orientation:

[0022] (iii) the second nucleic acid sequence-a first linker-the third nucleic acid sequence-a second linker-the first nucleic acid sequence; or

[0023] (iv) the third nucleic acid sequence-a first linker-the second nucleic acid sequence-a second linker-the first nucleic acid sequence,

[0024] wherein the first and second linkers are different.

[0025] In some embodiments, the linker encodes a self-cleavage site, e.g., a P2A site, a T2A site, an E2A site, or an F2A site.

[0026] In some embodiments, the first linker encodes a P2A site and the second linker encodes a T2A site, wherein:

[0027] (i) the first linker comprises the nucleotide sequence of SEQ ID NO: 23 (or a sequence at least about 85%, 90%, 95%, 99% or more identical thereto, and/or having one, two, three or more substitutions, insertions, deletions, or modifications), and/or

[0028] (ii) the second linker comprises a nucleotide sequence encoding SEQ ID NO: 1478 (or a sequence at least about 85%, 90%, 95%, 99% or more identical thereto, and/or having one, two, three or more substitutions, insertions, deletions, or modifications).

[0029] In some embodiments, the first nucleic acid sequence, second nucleic acid sequence and third nucleic acid sequence are disposed on separate nucleic acid molecules, e.g., the first nucleic acid sequence is on one nucleic acid molecule and the second and third nucleic acid sequences are one a second nucleic acid molecule; or the first, second and third nucleic acid sequences are on three separate nucleic acid molecules.

[0030] In some embodiments, the third nucleic acid sequence encodes an amino acid comprising the sequence of SEQ ID NO: 1002, a sequence at least about 85%, 90%, 95%, 99% or more identical to SEQ ID NO:1002, or a sequence having one, two, three, four, five or more substitutions, insertions, deletions, or modifications compared to SEQ ID NO: 1002.

[0031] In some embodiments, the second nucleic acid sequence encodes an amino acid comprising the sequence of SEQ ID NO: 1001, a sequence at least about 85%, 90%, 95%, 99% or more identical to SEQ ID NO:1001, or a sequence having one, two, three, four, five or more substitutions, insertions, deletions, or modifications compared to SEQ ID NO: 1001.

[0032] In some embodiments, the single nucleic acid molecule does not comprise a suicide gene, e.g., an inducible suicide gene.

[0033] In some embodiments, the CAR molecule comprises, in an N- to C-terminal orientation, an antigen binding domain that binds to the antigen, a transmembrane domain, and an intracellular signaling domain. In some embodiments, the antigen binding domain is connected to the transmembrane domain by a hinge domain. In some embodiments, the CAR molecule further comprises a leader sequence. In some embodiments, the antigen is a solid tumor antigen.

[0034] In some embodiments, the antigen is chosen from: CD19; CD123; CD22; CD30; CD171; CS-1; C-type lectin-like molecule-1, CD33; epidermal growth factor receptor variant III (EGFRvIII); ganglioside G2 (GD2); ganglioside GD3; TNF receptor family member; B-cell maturation antigen; Tn antigen ((Tn Ag) or (GalNAcα-Ser/Thr)); prostate-specific membrane antigen (PSMA); Receptor tyrosine kinase-like orphan receptor 1 (ROR1); Fms-Like Tyrosine Kinase 3 (FLT3); Tumor-associated glycoprotein 72 (TAG72); CD38; CD44v6; Carcinoembryonic antigen (CEA); Epithelial cell adhesion molecule (EPCAM); B7H3 (CD276); KIT (CD117); Interleukin-13 receptor subunit alpha-2; Mesothelin; Interleukin 11 receptor alpha (IL-11Ra); prostate stem cell antigen (PSCA); Protease Serine 21; vascular endothelial growth factor receptor 2 (VEGFR2); Lewis (Y) antigen; CD24; Platelet-derived growth factor receptor beta (PDGFR-beta); Stage-specific embryonic antigen-4 (SSEA-4); CD20; Folate receptor alpha; Receptor tyrosine-protein kinase ERBB2 (Her2/neu); Mucin 1, cell surface associated (MUC1); epidermal growth factor receptor (EGFR); neural cell adhesion molecule (NCAM); Prostase; prostatic acid phosphatase (PAP); elongation factor 2 mutated (ELF2M); Ephrin B2; fibroblast activation protein alpha (FAP); insulin-like growth factor 1 receptor (IGF-I receptor), carbonic anhydrase IX (CAIX); Proteasome (Prosome, Macropain) Subunit, Beta Type, 9 (LMP2); glycoprotein 100 (gp100); oncogene polypeptide consisting of breakpoint cluster region (BCR) and Abelson murine leukemia viral oncogene homolog 1 (Abl) (bcr-abl); tyrosinase; ephrin type-A receptor 2 (EphA2); Fucosyl GM1; sialyl Lewis adhesion molecule (sLe); ganglioside GM3; transglutaminase 5 (TGS5); high molecular weight-melanoma-associated antigen (HMWMAA); o-acetyl-GD2 ganglioside (OAcGD2); Folate receptor beta; tumor endothelial marker 1 (TEM1/CD248); tumor endothelial marker 7-related (TEM7R); claudin 6 (CLDN6); thyroid stimulating hormone receptor (TSHR); G protein-coupled receptor class C group 5, member D (GPRC5D); chromosome X open reading frame 61 (CXORF61); CD97; CD179a; anaplastic lymphoma kinase (ALK); Polysialic acid; placenta-specific 1 (PLAC1); hexasaccharide portion of globoH glycoceramide (GloboH); mammary gland differentiation antigen (NY-BR-1); uroplakin 2 (UPK2); Hepatitis A virus cellular receptor 1 (HAVCR1); adrenoceptor beta 3 (ADRB3); pannexin 3 (PANX3); G protein-coupled receptor 20 (GPR20); lymphocyte antigen 6 complex, locus K 9 (LY6K); Olfactory receptor 51E2 (OR51E2); TCR Gamma Alternate Reading Frame Protein (TARP); Wilms tumor protein (WT1); Cancer/testis antigen 1 (NY-ESO-1); Cancer/testis antigen 2 (LAGE-1a); Melanoma-associated antigen 1 (MAGE-A1); ETS translocation-variant gene 6, located on chromosome 12p (ETV6-AML); sperm protein 17 (SPA17); X Antigen Family, Member 1A (XAGE1); angiopoietin-binding cell surface receptor 2 (Tie 2); melanoma cancer testis antigen-1 (MAD-CT-1); melanoma cancer testis antigen-2 (MAD-CT-2); Fos-related antigen 1; tumor protein p53 (p53); p53 mutant; prostein; surviving; telomerase; prostate carcinoma tumor antigen-1, melanoma antigen recognized by T cells 1; Rat sarcoma (Ras) mutant; human Telomerase reverse transcriptase (hTERT); sarcoma translocation breakpoints; melanoma inhibitor of apoptosis (ML-IAP); ERG (transmembrane protease, serine 2 (TMPRSS2) ETS fusion gene); N-Acetyl glucosaminyl-transferase V (NA17); paired box protein Pax-3 (PAX3); Androgen receptor; Cyclin B1; v-myc avian myelocytomatosis viral oncogene neuroblastoma derived homolog (MYCN); Ras Homolog Family Member C (RhoC); Tyrosinase-related protein 2 (TRP-2); Cytochrome P450 1B1 (CYP1B1); CCCTC-Binding Factor (Zinc Finger Protein)-Like, Squamous Cell Carcinoma Antigen Recognized By T Cells 3 (SART3); Paired box protein Pax-5 (PAX5); proacrosin binding protein sp32 (OY-TES1); lymphocyte-specific protein tyrosine kinase (LCK); A kinase anchor protein 4 (AKAP-4); synovial sarcoma, X breakpoint 2 (SSX2); Receptor for Advanced Glycation Endproducts (RAGE-1); renal ubiquitous 1 (RU1); renal ubiquitous 2 (RU2); legumain; human papilloma virus E6 (HPV E6); human papilloma virus E7 (HPV E7); intestinal carboxyl esterase; heat shock protein 70-2 mutated (mut hsp70-2); CD79a; CD79b; CD72; Leukocyte-associated immunoglobulin-like receptor 1 (LAIR1); Fc fragment of IgA receptor (FCAR or CD89); Leukocyte immunoglobulin-like receptor subfamily A member 2 (LILRA2); CD300 molecule-like family member f (CD300LF); C-type lectin domain family 12 member A (CLEC12A); bone marrow stromal cell antigen 2 (BST2); EGF-like module-containing mucin-like hormone receptor-like 2 (EMR2); lymphocyte antigen 75 (LY75); Glypican-3 (GPC3); Fc receptor-like 5 (FCRL5); or immunoglobulin lambda-like polypeptide 1 (IGLL1).

[0035] In some embodiments, the antigen is selected from mesothelin, EGFRvIII, GD2, Tn antigen, sTn antigen, Tn-O-Glycopeptides, sTn-O-Glycopeptides, PSMA, CD97, TAG72, CD44v6, CEA, EPCAM, KIT, IL-13Ra2, leguman, GD3, CD171, IL-11Ra, PSCA, MAD-CT-1, MAD-CT-2, VEGFR2, LewisY, CD24, PDGFR-beta, SSEA-4, folate receptor alpha, ERBBs (e.g., ERBB2), Her2/neu, MUC1, EGFR, NCAM, Ephrin B2, CAIX, LMP2, sLe, HMWMAA, o-acetyl-GD2, folate receptor beta, TEM1/CD248, TEM7R, FAP, Legumain, HPV E6 or E7, ML-IAP, CLDN6, TSHR, GPRC5D, ALK, polysialic acid, Fos-related antigen, neutrophil elastase, TRP-2, CYP1B1, sperm protein 17, beta human chorionic gonadotropin, AFP, thyroglobulin, PLAC1, globoH, RAGE1, MN-CA IX, human telomerase reverse transcriptase, intestinal carboxyl esterase, mut hsp 70-2, NA-17, NY-BR-1, UPK2, HAVCR1, ADRB3, PANX3, NY-ESO-1, GPR20, Ly6k, OR51E2, TARP, or GFRα4.

[0036] In some embodiments, the antigen is chosen from CD19, CD22, BCMA, CD20, CD123, EGFRvIII, or mesothelin.

[0037] In some embodiments, the antigen comprises mesothelin.

[0038] In some embodiments, the antigen comprises CD19.

[0039] In some embodiments, the antigen comprises BCMA.

[0040] In some embodiments, the transmembrane domain of the CAR molecule comprises a transmembrane domain of a protein chosen from the alpha, beta or zeta chain of the T-cell receptor, CD28, CD3 epsilon, CD45, CD4, CD5, CD8, CD9, CD16, CD22, CD33, CD37, CD64, CD80, CD86, CD123, CD134, CD137 or CD154. In some embodiments, the transmembrane domain comprises a transmembrane domain of CD8. In some embodiments, the transmembrane domain comprises the amino acid sequence of SEQ ID NO: 1026 (or a sequence at least about 85%, 90%, 95%, 99% or more identical thereto, and/or having one, two, three or more substitutions, insertions or deletions, e.g., conserved substitutions).

[0041] In some embodiments, the intracellular signaling domain of the CAR molecule comprises a primary signaling domain. In some embodiments, the primary signaling domain comprises a functional signaling domain derived from CD3 zeta, TCR zeta, FcR gamma, FcR beta, CD3 gamma, CD3 delta, CD3 epsilon, CD5, CD22, CD79a, CD79b, CD278 (ICOS), FcεRI, DAP10, DAP12, or CD66d. In some embodiments, the primary signaling domain comprises a functional signaling domain derived from CD3 zeta. In some embodiments, the primary signaling domain comprises the amino acid sequence of SEQ ID NO: 1034 or 1037 (or a sequence at least about 85%, 90%, 95%, 99% or more identical thereto, and/or having one, two, three or more substitutions, insertions or deletions, e.g., conserved substitutions).

[0042] In some embodiments, the intracellular signaling domain of the CAR molecule comprises a costimulatory domain. In some embodiments, the costimulatory domain comprises a functional signaling domain derived from a MHC class I molecule, TNF receptor protein, Immunoglobulin-like protein, cytokine receptor, integrin, signalling lymphocytic activation molecule (SLAM), activating NK cell receptor, BTLA, a Toll ligand receptor, OX40, CD2, CD7, CD27, CD28, CD30, CD40, CDS, ICAM-1, 4-1BB (CD137), B7-H3, ICOS (CD278), GITR, BAFFR, LIGHT, HVEM (LIGHTR), KIRDS2, SLAMF7, NKp80 (KLRF1), NKp44, NKp30, NKp46, CD19, CD4, CD8alpha, CD8beta, IL2R beta, IL2R gamma, IL7R alpha, ITGA4, VLA1, CD49a, ITGA4, IA4, CD49D, ITGA6, VLA-6, CD49f, ITGAD, CD11d, ITGAE, CD103, ITGAL, CD11a, LFA-1, ITGAM, CD11b, ITGAX, CD11c, ITGB1, CD29, ITGB2, CD18, ITGB7, NKG2D, NKG2C, TNFR2, TRANCE/RANKL, DNAM1 (CD226), SLAMF4 (CD244, 2B4), CD84, CD96 (Tactile), CEACAM1, CRTAM, Ly9 (CD229), CD160 (BY55), PSGL1, CD100 (SEMA4D), CD69, SLAMF6 (NTB-A, Ly108), SLAM (SLAMF1, CD150, IPO-3), BLAME (SLAMF8), SELPLG (CD162), LTBR, LAT, GADS, SLP-76, PAG/Cbp, CD19a, CD28-OX40, CD28-4-1BB, or a ligand that specifically binds with CD83. In some embodiments, the costimulatory domain comprises a functional signaling domain derived from 4-1BB. In some embodiments, the costimulatory domain comprises the amino acid sequence of SEQ ID NO: 1029 (or a sequence at least about 85%, 90%, 95%, 99% or more identical thereto, and/or having one, two, three or more substitutions, insertions or deletions, e.g., conserved substitutions).

[0043] In another aspect, disclosed herein is a CAR IL-15/IL15R polypeptide comprising:

[0044] (i) a chimeric antigen receptor (CAR) molecule that binds to an antigen (e.g., an antigen described herein, e.g., CD19, mesothelin, or BCMA);

[0045] (ii) an IL-15 receptor (IL-15R) molecule; and

[0046] (iii) an IL-15 molecule.

[0047] In some embodiments, (i)-(iii) are expressed in the same frame on a single polypeptide chain.

[0048] In some embodiments, the polypeptide has the following arrangement in an N- to C-terminal orientation: CAR molecule-a first linker-IL-15R molecule-a second linker-IL-15 molecule; or CAR molecule-a first linker-IL-15 molecule-a second linker-IL-15R molecule, wherein the first and second linkers are different.

[0049] In some embodiments, the polypeptide has the following arrangement in an N- to C-terminal orientation: IL-15R molecule-a first linker-IL-15 molecule-a second linker-CAR molecule; or IL-15 molecule-a first linker-IL-15R molecule-a second linker-CAR molecule, e.g., wherein the first and second linkers are different.

[0050] In some embodiments, the first linker comprises a P2A site and the second linker comprises a T2A site, wherein:

[0051] (i) the first linker comprises the amino acid sequence of SEQ ID NO: 1479 (or a sequence at least about 85%, 90%, 95%, 99% or more identical thereto, and/or having one, two, three or more substitutions, insertions, deletions, or modifications), and/or

[0052] (ii) the second linker comprises the amino acid sequence of SEQ ID NO: 1478 (or a sequence at least about 85%, 90%, 95%, 99% or more identical thereto, and/or having one, two, three or more substitutions, insertions, deletions, or modifications).

[0053] In some embodiments, (i)-(iii) are expressed as separate polypeptides.

[0054] In some embodiments, (i)-(iii) are all expressed as three separate polypeptides.

[0055] In some embodiments, (i) and (ii) are expressed in the same frame on a single polypeptide chain. In some embodiments, (iii) is expressed on a separate polypeptide.

[0056] In some embodiments, (i) and (iii) are expressed in the same frame on a single polypeptide chain. In some embodiments, (ii) is expressed on a separate polypeptide.

[0057] In some embodiments, (ii) and (iii) are expressed in the same frame on a single polypeptide chain. In some embodiments, (i) is expressed on a separate polypeptide.

[0058] In some embodiments, the polypeptide comprises the amino acid sequence of SEQ ID NO: 1002, a sequence at least about 85%, 90%, 95%, 99% or more identical to SEQ ID NO: 1002, or a sequence having one, two, three, four, five or more substitutions, insertions, deletions, or modifications compared to SEQ ID NO: 1002.

[0059] In some embodiments, the polypeptide comprises comprising the amino acid sequence of SEQ ID NO: 1001, a sequence at least about 85%, 90%, 95%, 99% or more identical to SEQ ID NO:1001, or a sequence having one, two, three, four, five or more substitutions, insertions, deletions, or modifications compared to SEQ ID NO: 1001.

[0060] In some embodiments, the polypeptide comprising the CAR molecule comprises, in an N- to C-terminal orientation, an antigen binding domain that binds to the antigen, a transmembrane domain, and an intracellular signaling domain, optionally wherein the antigen binding domain is connected to the transmembrane domain by a hinge domain.

[0061] In some embodiments, (i)-(iii) are in a single composition.

[0062] In one aspect, disclosed herein is a cell, e.g., an immune effector cell, comprising a nucleic acid molecule disclosed herein or a polypeptide disclosed herein.

[0063] In another aspect, disclosed herein is a vector, e.g., a lentiviral vector, comprising a comprising a nucleic acid molecule disclosed herein.

[0064] In yet another aspect, the disclosure provides a method of making a population of immune effector cells expressing Chimeric Antigen Receptor (CAR) molecule, IL-15R molecule and IL-15 molecule (“CAR IL-15/IL-15R expressing cells”), comprising:

[0065] a) providing a population of immune effector cells, e.g., T cells or NK cells;

[0066] b) contacting the population of immune effector cells with a nucleic acid molecule disclosed herein, or a vector disclosed herein; and

[0067] c) maintaining the cells under conditions that allow expression of the CAR polypeptide, thereby making a population of CAR IL-15/IL-15R expressing immune effector cells.

[0068] In some embodiments, the nucleic acid is DNA or RNA.

[0069] In some embodiments, (b) comprises performing lentiviral transduction to deliver the nucleic acid to the immune effector cells.

[0070] In some embodiments, the CAR IL-15/IL-15R expressing cells comprise a single composition.

[0071] In some embodiments, the method further comprises contacting the population of cells with a ligand, e.g., with an extracellular ligand, that binds to the CAR molecule, thereby stimulating the population of cells. In some embodiments, the ligand comprises a cognate antigen molecule or an antibody molecule that binds to the CAR molecule. In some embodiments, the ligand, e.g., cognate antigen molecule, is immobilized, e.g., on a substrate, e.g., a bead or a cell, or is soluble. In some embodiments, the population of cells is contacted, e.g., stimulated, with the cognate antigen molecule at least 1 time, 2 times, 3 times, 4 times, 5 times, 6 times, 7 times or 8 times, e.g., 4 times, wherein each contact period, e.g., stimulation, lasts for about 1 week. In some embodiments, the method further comprises contacting the population of cells with an IL-21 molecule. In some embodiments, the IL-21 molecule is provided at an amount of at least 5, 10, 15, 20, 30, 40, 50 or 100 ug/ml, e.g., 10 ug/ml. In some embodiments, the IL-21 molecule promotes a naïve T cell phenotype, e.g., CD45RO− CCR7+.

[0072] In some embodiments, following contacting, e.g., stimulating, with the cognate antigen molecule, the population of cells is not contacted with an exogenous cytokine or cognate antigen molecule.

[0073] In some embodiments, the population of cells is maintained for at least 1, 2, 3, 4, 5, 6, 7, 8, 9, 10, 11, 12, 13, 14, 15 or 20 weeks, e.g., 10 weeks.

[0074] In some embodiments, the population of cells has one, two, three, four or all of the following characteristics:

[0075] (i) no or minimal loss in viability as measured by an assay of Example 1;

[0076] (ii) an antigen specific response, e.g., maintenance of an antigen specific response, as measured by an assay of Example 1;

[0077] (iii) ability to induce degranulation, e.g., maintenance of an ability to induce degranulation, e.g., as measured by CD107a expression, as measured by an assay of Example 1;

[0078] (iv) ability to induce IFN-g release, e.g., maintenance of an ability to induce IFN-g release, e.g., as measured by IFN-g expression in an assay of Example 1; or

[0079] (v) mitochondrial activity, e.g., maintenance of mitochondrial activity, as measured by an assay of Example 1,

[0080] compared to an otherwise similar CAR IL-15/IL-15R expressing population prior to culturing without cytokine or antigen, e.g., at four weeks after contacting, e.g., stimulation, with a cognate antigen molecule.

[0081] In some embodiments, any of the methods disclosed herein results in an increase in the population of cells expressing CD45RO−CCR7+, e.g., by about at least 10%, 20%, 30%, 40%, 50%, 60%, 70%, 80%, 90%, 95%, 100% or greater, compared to a population of immune effector cells contacted with a nucleic acid molecule encoding a CAR molecule without IL-15R and/or IL-15.

[0082] In some embodiments, any of the methods of making disclosed herein comprises

[0083] (i) expanding the population of cells, e.g., for at least 1, 2, 3, 4, 5, 6, 7, 8, 9, 10, 11, 12, 13, 14, 15, 16, 17, 18, 19, 20, 21, 22, 23, 24, 25, 26, 27, or 28 days or for 1-7, 7-14, 14-21, or 14-28 days; or

[0084] (ii) expanding the population of cells, e.g., by at least, 5, 10, 20, 30, 40, 50, 60, 70, 80, 90, or 100-fold change in cell number or more, e.g., up to about 40 or 50-fold, e.g., under growth conditions of Example 1.

[0085] In some embodiments, the population of CAR IL-15/IL-15R expressing cell exhibits enhanced anti-tumor efficacy compared to a population of cells expressing a CAR molecule, as measured by an assay of Example 1.

[0086] In one aspect, disclosed herein is a method of evaluating a population of CAR IL-15/IL-15R expressing cells, comprising measuring the level, e.g., activity or expression level, of CD45RO and CCR7 in the population of cells, wherein:

[0087] a low level of CD45RO expression (e.g., CD45RO−) and a high level of CCR7 expression (e.g., CCR7+) is indicative that the sample is suitable for treatment; and

[0088] a high level of CD45RO expression (e.g., CD45RO+) and a low level of CCR7 expression (e.g., CCR7−) is indicative that the sample is not suitable for treatment thereby evaluating the CAR-IL-15 complex expressing cell.

[0089] In another aspect, the disclosure provides, a cell, e.g., an immune effector cell, e.g., a T cell or NK cell, comprising:

[0090] (i) a first nucleic acid sequence encoding a chimeric antigen receptor (CAR) molecule that binds to an antigen (e.g., an antigen described herein, e.g., CD19, mesothelin or BCMA);

[0091] (ii) a second nucleic acid sequence encoding an IL-15 receptor (IL-15R) molecule; and

[0092] (iii) a third nucleic acid sequence encoding an IL-15 molecule.

[0093] In some embodiments, the IL-15R molecule and IL-15 molecule are expressed in the same cell as the CAR molecule.

[0094] In some embodiments, the first nucleic acid sequence, the second nucleic acid sequence, and the third nucleic acid sequence are disposed on a single nucleic acid molecule, e.g., a vector, e.g., a viral vector, e.g., a lentivirus vector.

[0095] In some embodiments, the single nucleic acid molecule has the following arrangement in an N- to C-terminal orientation:

[0096] (i) the first nucleic acid sequence-a first linker-the second nucleic acid sequence-a second linker-the third nucleic acid sequence; or

[0097] (ii) the first nucleic acid sequence-a first linker-the third nucleic acid sequence-a second linker-the second nucleic acid sequence,

[0098] wherein the first and second linkers are different.

[0099] In some embodiments, the single nucleic acid molecule has the following arrangement in an N- to C-terminal orientation:

[0100] (iii) the second nucleic acid sequence-a first linker-the third nucleic acid sequence-a second linker-the first nucleic acid sequence; or

[0101] (iv) the third nucleic acid sequence-a first linker-the second nucleic acid sequence-a second linker-the first nucleic acid sequence,

[0102] wherein the first and second linkers are different.

[0103] In some embodiments, the linker encodes a self-cleavage site, e.g., a P2A site, a T2A site, an E2A site, or an F2A site.

[0104] In some embodiments, the first nucleic acid sequence, second nucleic acid sequence and third nucleic acid sequence are disposed on separate nucleic acid molecules, e.g., separate vectors, e.g., separate viral vectors, e.g., separate lentivirus vectors.

[0105] In some embodiments, the first nucleic acid sequence is disposed on a first nucleic acid molecule, e.g., a first vector, e.g., a first viral vector, e.g., a first lentivirus vector. In some embodiments, the second nucleic acid sequence is disposed on a second nucleic acid molecule, e.g., a second vector, e.g., a second viral vector, e.g., a second lentivirus vector. In some embodiments, the third nucleic acid sequence is disposed on a third nucleic acid molecule, e.g., a third vector, e.g., a third viral vector, e.g., a third lentivirus vector.

[0106] In some embodiments, the first nucleic acid sequence and the second nucleic acid sequence are disposed on a first nucleic acid molecule, e.g., a first vector, e.g., a first viral vector, e.g., a first lentivirus vector. In some embodiments, the third nucleic acid sequence is disposed on a second nucleic acid molecule, e.g., a second vector, e.g., a second viral vector, e.g., a second lentivirus vector.

[0107] In some embodiments, the first nucleic acid sequence and the third nucleic acid sequence are disposed on a first nucleic acid molecule, e.g., a first vector, e.g., a first viral vector, e.g., a first lentivirus vector. In some embodiments, the second nucleic acid sequence is disposed on a second nucleic acid molecule, e.g., a second vector, e.g., a second viral vector, e.g., a second lentivirus vector.

[0108] In some embodiments, the first nucleic acid sequence is disposed on a first nucleic acid molecule, e.g., a first vector, e.g., a first viral vector, e.g., a first lentivirus vector. In some embodiments, the second nucleic acid sequence and the third nucleic acid sequence are disposed on a second nucleic acid molecule, e.g., a second vector, e.g., a second viral vector, e.g., a second lentivirus vector.

[0109] In some embodiments, the CAR molecule comprises, in an N- to C-terminal orientation, an antigen binding domain that binds to the antigen, a transmembrane domain, and an intracellular signaling domain. In some embodiments, the antigen binding domain is connected to the transmembrane domain by a hinge domain.

[0110] In yet another aspect, disclosed herein is a method of treating a subject having a disease associated with expression of an antigen, e.g., a tumor antigen described herein, e.g., CD19, mesothelin or BCMA, comprising administering to the subject an effective number of a population of cells disclosed herein, or a population of cells comprising a nucleic acid molecule disclosed herein (e.g., a population of cells comprising one or more nucleic acid molecules disclosed herein), or a population of cells comprising a polypeptide disclosed herein (e.g., a population of cells comprising one or more polypeptides disclosed herein).

[0111] In a further aspect, disclosed herein, is a method of providing an anti-cancer immune response in a subject having a disease associated with expression of an antigen, e.g., a tumor antigen described herein, e.g., CD19, mesothelin or BCMA, comprising administering to the subject an effective number of a population of cells disclosed herein, or a population of cells comprising a nucleic acid molecule disclosed herein (e.g., a population of cells comprising one or more nucleic acid molecules disclosed herein), or a population of cells comprising a polypeptide disclosed herein (e.g., a population of cells comprising one or more polypeptides disclosed herein).

[0112] In some embodiments, the disease associated with expression of an antigen, e.g., a tumor antigen described herein, e.g., CD19, mesothelin or BCMA, is a cancer.

[0113] In some embodiments, cancer is a solid tumor. In some embodiments, the cancer is chosen from mesothelioma (e.g., malignant pleural mesothelioma); lung cancer (e.g., non-small cell lung cancer, small cell lung cancer, squamous cell lung cancer, or large cell lung cancer); pancreatic cancer (e.g., pancreatic ductal adenocarcinoma, or metastatic pancreatic ductal adenocarcinoma (PDA)); esophageal cancer (e.g., esophageal adenocarcinoma), ovarian cancer (e.g., serous epithelial ovarian cancer), breast cancer, colorectal cancer, bladder cancer, glioblastoma, prostate cancer, cervical cancer, skin cancer, melanoma, renal cancer, liver cancer, brain cancer, thymoma, sarcoma, carcinoma, uterine cancer, kidney cancer, gastrointestinal cancer, urothelial cancer, pharynx cancer, head and neck cancer, rectal cancer, or any combination thereof.

[0114] In some embodiments, the cancer is a hematological cancer, e.g., a hematological cancer chosen from a leukemia or lymphoma, e.g., the cancer is chosen from chronic lymphocytic leukemia (CLL), mantle cell lymphoma (MCL), multiple myeloma, acute lymphoid leukemia (ALL), Hodgkin lymphoma, B-cell acute lymphoid leukemia (BALL), T-cell acute lymphoid leukemia (TALL), small lymphocytic leukemia (SLL), B cell prolymphocytic leukemia, blastic plasmacytoid dendritic cell neoplasm, Burkitt's lymphoma, diffuse large B cell lymphoma (DLBCL), DLBCL associated with chronic inflammation, chronic myeloid leukemia, myeloproliferative neoplasms, follicular lymphoma, pediatric follicular lymphoma, hairy cell leukemia, small cell- or a large cell-follicular lymphoma, malignant lymphoproliferative conditions, MALT lymphoma (extranodal marginal zone lymphoma of mucosa-associated lymphoid tissue), Marginal zone lymphoma, myelodysplasia, myelodysplastic syndrome, non-Hodgkin lymphoma, plasmablastic lymphoma, plasmacytoid dendritic cell neoplasm, Waldenstrom macroglobulinemia, splenic marginal zone lymphoma, splenic lymphoma/leukemia, splenic diffuse red pulp small B-cell lymphoma, hairy cell leukemia-variant, lymphoplasmacytic lymphoma, a heavy chain disease, plasma cell myeloma, solitary plasmocytoma of bone, extraosseous plasmocytoma, nodal marginal zone lymphoma, pediatric nodal marginal zone lymphoma, primary cutaneous follicle center lymphoma, lymphomatoid granulomatosis, primary mediastinal (thymic) large B-cell lymphoma, intravascular large B-cell lymphoma, ALK+ large B-cell lymphoma, large B-cell lymphoma arising in HHV8-associated multicentric Castleman disease, primary effusion lymphoma, B-cell lymphoma, acute myeloid leukemia (AML), or unclassifiable lymphoma.

[0115] In some embodiments, a cell described herein is administered systemically or locally.

[0116] In some embodiments, the subject has a tumor, e.g., a solid tumor and the cell, is administered through intratumoral administration.

[0117] In some embodiments, the method further comprises administering a third therapeutic agent, e.g., as described herein. In some embodiments, the third therapeutic agent is a checkpoint modulator. In some embodiments, the third therapeutic agent is an anti-PD-1 antibody molecule, an anti-PD-L1 antibody molecule, an anti-CTLA-4 antibody molecule, an anti-TIM-3 antibody molecule, or an anti-LAG-3 molecule.

[0118] In one aspect, disclosed herein, is method of evaluating or predicting a subject's responsiveness to a CAR-expressing cell therapy, comprising acquiring a value for the level, e.g., activity or expression level, of CD45RO and CCR7 in the population of cells, wherein:

[0119] a low level of CD45RO expression (e.g., CD45RO−) and a high level of CCR7 expression (e.g., CCR7+) is indicative or predictive of increased responsiveness of the subject to the CAR IL-15/IL-15R-expressing cell therapy; and

[0120] a high level of CD45RO expression (e.g., CD45RO+) and a low level of CCR7 expression (e.g., CCR7−) is indicative or predictive of decreased responsiveness of the subject to the CAR IL-15/IL-15R-expressing cell therapy,

[0121] thereby evaluating or predicting the subject's responsiveness to the CAR IL-15/IL-15R expressing cell therapy.

[0122] Although methods and materials similar or equivalent to those described herein can be used in the practice or testing of the present invention, suitable methods and materials are described below. All publications, patent applications, patents, and other references (e.g., sequence database reference numbers) mentioned herein are incorporated by reference in their entirety. For example, all GenBank, Unigene, and Entrez sequences referred to herein, e.g., in any Table herein, are incorporated by reference. Unless otherwise specified, the sequence accession numbers specified herein, including in any Table herein, refer to the database entries current as of Feb. 13, 2019. When one gene or protein references a plurality of sequence accession numbers, all of the sequence variants are encompassed.

[0123] In addition, the materials, methods, and examples are illustrative only and not intended to be limiting. Headings, sub-headings or numbered or lettered elements, e.g., (a), (b), (i) etc., are presented merely for ease of reading. The use of headings or numbered or lettered elements in this document does not require the steps or elements be performed in alphabetical order or that the steps or elements are necessarily discrete from one another. Other features, objects, and advantages of the invention will be apparent from the description and drawings, and from the claims.

### BRIEF DESCRIPTION OF THE DRAWINGS

[0124] FIG. 1 shows schematics of lentiviral constructs used in Example 1. The CAR19 construct comprised a chimeric antigen receptor (CAR) targeting huCD19 with a CD8 leader (L), CD8 hinge (H), transmembrane domain (M), and intracellular domains (ICD) CD137 (4-1BB) and CD3 zeta (CD3-z). The CAR19+IL-15R/−IL15 construct comprised the CAR19 construct and a P2A system, IL-15R, a T2A system and IL-15. The IL-15R/−IL15 construct comprised IL-15R, a T2A system and IL-15. The CARmeso+IL-15R/−IL15 construct comprised the CARmeso construct and and a P2A system, IL-15R, a T2A system and IL-15. The CARmeso construct comprised a chimeric antigen receptor (CAR) targeting human mesothelin, with a CD8 leader (L), CD8 hinge (H), transmembrane domain (M), and intracellular domains (ICD) CD137 (4-1BB) and CD3 zeta (CD3-z). Lentiviral constructs used to express chimeric antigen receptors (CAR) targeting huCD19 (CAR19) or hu mesothelin (CARmeso) with a CD8 leader (L), CD8 hinge (H), transmembrane domain (M), and intracellular domains (ICD) CD137 (4-1BB) and CD3 zeta (CD3-z). IL-15Ra and IL-15 were co-expressed using the T2A system (T) which was co-expressed with the CAR using the P2A system (P). Lentiviral constructs were pseudotyped with VSV/G.

[0125] FIGS. 2A, 2B, 2C and 2D show CAR modified T cell expansions. FIG. 2A shows CAR19 T cells, and FIG. 2B shows CARmeso T cells, normalized for transductions efficiency with similar mean fluorescent expression. The CAR T cells were expanded through four rounds of re-stimulation with Nalm6 (N6) or K562-meso cells. Some groups were cultured with no antigen (No N6, No K-meso, or No Ag), while others were supplemented with 100 U/ml IL-2 and/or 10 ug/ml IL-21 as indicated in the figure. FIGS. 2C and 2D show results after 4 weeks of re-stimulation. After re-stimulation, T cells were cultured alone, e.g., without cytokines, re-placing half media volume every 3-4 days without any cytokine supplements for up to an additional 13 weeks. T cell growth expansions monitored by number and size using a Coulter Multisizer IV.

[0126] FIG. 3 shows flow cytometry plots depicting phenotypes of CAR T cells after expansion. CAR19 T cells cultures at the end of weeks 1, 3 and 4 were stained for CCR7 and CD45 expression and the T cell subsets were defined as follows: naïve (CCR7+/CD45RO−), Central memory (CCR7+/CD45RO+), Effector memory (CCR7−/CD45RO+) and terminal effectors (CCR7−/CD45RO−). T cell cultures at end of week 4 was >90% CD8+.

[0127] FIG. 4 shows flow cytometry plots depicting effector function of CAR T cells. T cell populations at week 4 and week 13 were co-cultured with or without either K562 cells expressing CD19 (K562-CD19) or mesothelin (K562-Meso), or PMA and ionomycin and incubated for 6 hours with CD107a, monesin and Brefeldin A. The resulting T cell populations were fluorescently stained for life/dead, surface expression of CD3, CD4, CD8 and followed by intracellular staining detecting IFN-γ.

[0128] FIGS. 5A, 5B, 5C, and 5D are graphs depicting long term tumor control in CARmeso T cells co-expressing IL-15R/IL-15 compared to CARmeso T cells. One million were injected subcutaneously into the right flanks of NSG mice to establish tumors. Tumor growth was monitored by caliper measurements. On day 38 (tumors averaged 250 mm³) either 1×10⁵ or 3×10⁵ CAR+ T cells were injected intratumorally (IT) and tumors were monitored twice weekly.

### DESCRIPTION

### Definitions

[0129] Unless defined otherwise, all technical and scientific terms used herein have the same meaning as commonly understood by one of ordinary skill in the art to which the invention pertains.

[0130] The term “a” and “an” refers to one or to more than one (i.e., to at least one) of the grammatical object of the article. By way of example, “an element” means one element or more than one element.

[0131] The term “about” when referring to a measurable value such as an amount, a temporal duration, and the like, is meant to encompass variations of ±20% or in some instances ±10%, or in some instances ±5%, or in some instances ±1%, or in some instances ±0.1% from the specified value, as such variations are appropriate to perform the disclosed methods.

[0132] The term “Chimeric Antigen Receptor” or alternatively a “CAR” refers to a recombinant polypeptide construct comprising at least an extracellular antigen binding domain, a transmembrane domain and a cytoplasmic signaling domain (also referred to herein as “an intracellular signaling domain”) comprising a functional signaling domain derived from a stimulatory molecule as defined below. In some embodiments, the domains in the CAR polypeptide construct are in the same polypeptide chain, e.g., comprise a chimeric fusion protein. In some embodiments, the domains in the CAR polypeptide construct are not contiguous with each other, e.g., are in different polypeptide chains, e.g., as provided in an RCAR as described herein.

[0133] In one aspect, the cytoplasmic signaling domain comprises a primary signaling domain (e.g., a primary signaling domain of CD3-zeta). In one aspect, the cytoplasmic signaling domain further comprises one or more functional signaling domains derived from at least one costimulatory molecule as defined below. In one aspect, the costimulatory molecule is chosen from 41BB (i.e., CD137), CD27, ICOS, and/or CD28. In one aspect, the CAR comprises a chimeric fusion protein comprising an extracellular antigen recognition domain, a transmembrane domain and an intracellular signaling domain comprising a functional signaling domain derived from a stimulatory molecule. In one aspect, the CAR comprises a chimeric fusion protein comprising an extracellular antigen recognition domain, a transmembrane domain and an intracellular signaling domain comprising a functional signaling domain derived from a co-stimulatory molecule and a functional signaling domain derived from a stimulatory molecule. In one aspect, the CAR comprises a chimeric fusion protein comprising an extracellular antigen recognition domain, a transmembrane domain and an intracellular signaling domain comprising two functional signaling domains derived from one or more co-stimulatory molecule(s) and a functional signaling domain derived from a stimulatory molecule. In one aspect, the CAR comprises a chimeric fusion protein comprising an extracellular antigen recognition domain, a transmembrane domain and an intracellular signaling domain comprising at least two functional signaling domains derived from one or more co-stimulatory molecule(s) and a functional signaling domain derived from a stimulatory molecule. In one aspect the CAR comprises an optional leader sequence at the amino-terminus (N-ter) of the CAR fusion protein. In one aspect, the CAR further comprises a leader sequence at the N-terminus of the extracellular antigen recognition domain, wherein the leader sequence is optionally cleaved from the antigen recognition domain (e.g., an scFv) during cellular processing and localization of the CAR to the cellular membrane.

[0134] A CAR that comprises an antigen binding domain (e.g., an scFv, a single domain antibody, or TCR (e.g., a TCR alpha binding domain or TCR beta binding domain)) that targets a specific tumor marker X, wherein X can be a tumor marker as described herein, is also referred to as XCAR. For example, a CAR that comprises an antigen binding domain that targets CD19 is referred to as CD19CAR. The CAR can be expressed in any cell, e.g., an immune effector cell as described herein (e.g., a T cell or an NK cell).

[0135] The term “signaling domain” refers to the functional portion of a protein which acts by transmitting information within the cell to regulate cellular activity via defined signaling pathways by generating second messengers or functioning as effectors by responding to such messengers.

[0136] The term “antibody,” as used herein, refers to a protein, or polypeptide sequence derived from an immunoglobulin molecule, which specifically binds with an antigen. Antibodies can be polyclonal or monoclonal, multiple or single chain, or intact immunoglobulins, and may be derived from natural sources or from recombinant sources. Antibodies can be tetramers of immunoglobulin molecules.

[0137] The term “antibody fragment” refers to at least one portion of an intact antibody, or recombinant variants thereof, and refers to the antigen binding domain, e.g., an antigenic determining variable region of an intact antibody, that is sufficient to confer recognition and specific binding of the antibody fragment to a target, such as an antigen. Examples of antibody fragments include, but are not limited to, Fab, Fab′, F(ab′)2, and Fv fragments, scFv antibody fragments, linear antibodies, single domain antibodies such as sdAb (either VL or VH), camelid VHH domains, and multi-specific molecules formed from antibody fragments such as a bivalent fragment comprising two or more, e.g., two, Fab fragments linked by a disulfide brudge at the hinge region, or two or more, e.g., two isolated CDR or other epitope binding fragments of an antibody linked. An antibody fragment can also be incorporated into single domain antibodies, maxibodies, minibodies, nanobodies, intrabodies, diabodies, triabodies, tetrabodies, v-NAR and bis-scFv (see, e.g., Hollinger and Hudson, Nature Biotechnology 23:1126-1136, 2005). Antibody fragments can also be grafted into scaffolds based on polypeptides such as a fibronectin type III (Fn3) (see U.S. Pat. No. 6,703,199, which describes fibronectin polypeptide minibodies).

[0138] The term “scFv” refers to a fusion protein comprising at least one antibody fragment comprising a variable region of a light chain and at least one antibody fragment comprising a variable region of a heavy chain, wherein the light and heavy chain variable regions are contiguously linked via a short flexible polypeptide linker, and capable of being expressed as a single chain polypeptide, and wherein the scFv retains the specificity of the intact antibody from which it is derived. Unless specified, as used herein an scFv may have the VL and VH variable regions in either order, e.g., with respect to the N-terminal and C-terminal ends of the polypeptide, the scFv may comprise VL-linker-VH or may comprise VH-linker-VL.

[0139] The terms “complementarity determining region” or “CDR,” as used herein, refer to the sequences of amino acids within antibody variable regions which confer antigen specificity and binding affinity. For example, in general, there are three CDRs in each heavy chain variable region (e.g., HCDR1, HCDR2, and HCDR3) and three CDRs in each light chain variable region (LCDR1, LCDR2, and LCDR3). The precise amino acid sequence boundaries of a given CDR can be determined using any of a number of well-known schemes, including those described by Kabat et al. (1991), “Sequences of Proteins of Immunological Interest,” 5th Ed. Public Health Service, National Institutes of Health, Bethesda, Md. (“Kabat” numbering scheme), Al-Lazikani et al., (1997) JMB 273, 927-948 (“Chothia” numbering scheme), or a combination thereof. Under the Kabat numbering scheme, in some embodiments, the CDR amino acid residues in the heavy chain variable domain (VH) are numbered 31-35 (HCDR1), 50-65 (HCDR2), and 95-102 (HCDR3); and the CDR amino acid residues in the light chain variable domain (VL) are numbered 24-34 (LCDR1), 50-56 (LCDR2), and 89-97 (LCDR3). Under the Chothia numbering scheme, in some embodiments, the CDR amino acids in the VH are numbered 26-32 (HCDR1), 52-56 (HCDR2), and 95-102 (HCDR3); and the CDR amino acid residues in the VL are numbered 26-32 (LCDR1), 50-52 (LCDR2), and 91-96 (LCDR3). In a combined Kabat and Chothia numbering scheme, in some embodiments, the CDRs correspond to the amino acid residues that are part of a Kabat CDR, a Chothia CDR, or both. For instance, in some embodiments, the CDRs correspond to amino acid residues 26-35 (HCDR1), 50-65 (HCDR2), and 95-102 (HCDR3) in a VH, e.g., a mammalian VH, e.g., a human VH; and amino acid residues 24-34 (LCDR1), 50-56 (LCDR2), and 89-97 (LCDR3) in a VL, e.g., a mammalian VL, e.g., a human VL.

[0140] The portion of the CAR composition of the invention comprising an antibody or antibody fragment thereof may exist in a variety of forms, for example, where the antigen binding domain is expressed as part of a polypeptide chain including, for example, a single domain antibody fragment (sdAb), a single chain antibody (scFv), or e.g., a humanized antibody (Harlow et at, 1999, In: Using Antibodies: A Laboratory Manual, Cold Spring Harbor Laboratory Press, NY; Harlow et al., 1989, In: Antibodies: A Laboratory Manual, Cold Spring Harbor, N.Y.; Houston et al., 1988, Proc. Natl. Acad. Sci. USA 85:5879-5883; Bird et al., 1988, Science 242:423-426). In one aspect, the antigen binding domain of a CAR composition of the invention comprises an antibody fragment. In a further aspect, the CAR comprises an antibody fragment that comprises an scFv.

[0141] As used herein, the term “binding domain” or “antibody molecule” (also referred to herein as “anti-target binding domain”) refers to a protein, e.g., an immunoglobulin chain or fragment thereof, comprising at least one immunoglobulin variable domain sequence. The term “binding domain” or “antibody molecule” encompasses antibodies and antibody fragments. In an embodiment, an antibody molecule is a multispecific antibody molecule, e.g., it comprises a plurality of immunoglobulin variable domain sequences, wherein a first immunoglobulin variable domain sequence of the plurality has binding specificity for a first epitope and a second immunoglobulin variable domain sequence of the plurality has binding specificity for a second epitope. In an embodiment, a multispecific antibody molecule is a bispecific antibody molecule. A bispecific antibody has specificity for no more than two antigens. A bispecific antibody molecule is characterized by a first immunoglobulin variable domain sequence which has binding specificity for a first epitope and a second immunoglobulin variable domain sequence that has binding specificity for a second epitope. The term “antibody heavy chain,” refers to the larger of the two types of polypeptide chains present in antibody molecules in their naturally occurring conformations, and which normally determines the class to which the antibody belongs.

[0142] The term “antibody light chain,” refers to the smaller of the two types of polypeptide chains present in antibody molecules in their naturally occurring conformations. Kappa (κ) and lambda (λ) light chains refer to the two major antibody light chain isotypes.

[0143] The term “recombinant antibody” refers to an antibody which is generated using recombinant DNA technology, such as, for example, an antibody expressed by a bacteriophage or yeast expression system. The term should also be construed to mean an antibody which has been generated by the synthesis of a DNA molecule encoding the antibody and which DNA molecule expresses an antibody protein, or an amino acid sequence specifying the antibody, wherein the DNA or amino acid sequence has been obtained using recombinant DNA or amino acid sequence technology which is available and well known in the art.

[0144] The term “antigen” or “Ag” refers to a molecule that provokes an immune response. This immune response may involve either antibody production, or the activation of specific immunologically-competent cells, or both. The skilled artisan will understand that any macromolecule, including virtually all proteins or peptides, can serve as an antigen. Furthermore, antigens can be derived from recombinant or genomic DNA. A skilled artisan will understand that any DNA, which comprises a nucleotide sequences or a partial nucleotide sequence encoding a protein that elicits an immune response therefore encodes an “antigen” as that term is used herein. Furthermore, one skilled in the art will understand that an antigen need not be encoded solely by a full length nucleotide sequence of a gene. It is readily apparent that the present invention includes, but is not limited to, the use of partial nucleotide sequences of more than one gene and that these nucleotide sequences are arranged in various combinations to encode polypeptides that elicit the desired immune response. Moreover, a skilled artisan will understand that an antigen need not be encoded by a “gene” at all. It is readily apparent that an antigen can be generated synthesized or can be derived from a biological sample, or might be macromolecule besides a polypeptide. Such a biological sample can include, but is not limited to a tissue sample, a tumor sample, a cell or a fluid with other biological components.

[0145] The term “anti-tumor effect” refers to a biological effect which can be manifested by various means, including but not limited to, e.g., a decrease in tumor volume, a decrease in the number of tumor cells, a decrease in the number of metastases, an increase in life expectancy, decrease in tumor cell proliferation, decrease in tumor cell survival, or amelioration of various physiological symptoms associated with the cancerous condition. An “anti-tumor effect” can also be manifested by the ability of the peptides, polynucleotides, cells and antibodies of the invention in prevention of the occurrence of tumor in the first place.

[0146] The term “anti-cancer effect” refers to a biological effect which can be manifested by various means, including but not limited to, e.g., a decrease in tumor volume, a decrease in the number of cancer cells, a decrease in the number of metastases, an increase in life expectancy, decrease in cancer cell proliferation, decrease in cancer cell survival, or amelioration of various physiological symptoms associated with the cancerous condition. An “anti-cancer effect” can also be manifested by the ability of the peptides, polynucleotides, cells and antibodies in prevention of the occurrence of cancer in the first place. The term “anti-tumor effect” refers to a biological effect which can be manifested by various means, including but not limited to, e.g., a decrease in tumor volume, a decrease in the number of tumor cells, a decrease in tumor cell proliferation, or a decrease in tumor cell survival. The term “autologous” refers to any material derived from the same individual to whom it is later to be re-introduced into the individual.

[0147] The term “allogeneic” refers to any material derived from a different animal of the same species as the individual to whom the material is introduced. Two or more individuals are said to be allogeneic to one another when the genes at one or more loci are not identical. In some aspects, allogeneic material from individuals of the same species may be sufficiently unlike genetically to interact antigenically.

[0148] The term “xenogeneic” refers to a graft derived from an animal of a different species.

[0149] The term “apheresis” as used herein refers to the art-recognized extracorporeal process by which the blood of a donor or patient is removed from the donor or patient and passed through an apparatus that separates out selected particular constituent(s) and returns the remainder to the circulation of the donor or patient, e.g., by retransfusion. Thus, in the context of “an apheresis sample” refers to a sample obtained using apheresis.

[0150] The term “combination” refers to either a fixed combination in one dosage unit form, or a combined administration where a compound of the present invention and a combination partner (e.g. another drug as explained below, also referred to as “therapeutic agent” or “co-agent”) may be administered independently at the same time or separately within time intervals, especially where these time intervals allow that the combination partners show a cooperative, e.g. synergistic effect. The single components may be packaged in a kit or separately. One or both of the components (e.g., powders or liquids) may be reconstituted or diluted to a desired dose prior to administration. The terms “co-administration” or “combined administration” or the like as utilized herein are meant to encompass administration of the selected combination partner to a single subject in need thereof (e.g. a patient), and are intended to include treatment regimens in which the agents are not necessarily administered by the same route of administration or at the same time. The term “pharmaceutical combination” as used herein means a product that results from the mixing or combining of more than one active ingredient and includes both fixed and non-fixed combinations of the active ingredients. The term “fixed combination” means that the active ingredients, e.g. a compound of the present invention and a combination partner, are both administered to a patient simultaneously in the form of a single entity or dosage. The term “non-fixed combination” means that the active ingredients, e.g. a compound of the present invention and a combination partner, are both administered to a patient as separate entities either simultaneously, concurrently or sequentially with no specific time limits, wherein such administration provides therapeutically effective levels of the two compounds in the body of the patient. The latter also applies to cocktail therapy, e.g. the administration of three or more active ingredients.

[0151] The term “cancer” refers to a disease characterized by the rapid and uncontrolled growth of aberrant cells. Cancer cells can spread locally or through the bloodstream and lymphatic system to other parts of the body. Examples of various cancers are described herein and include but are not limited to, breast cancer, prostate cancer, ovarian cancer, cervical cancer, skin cancer, pancreatic cancer, colorectal cancer, renal cancer, liver cancer, brain cancer, lymphoma, leukemia, lung cancer and the like. Preferred cancers treated by the methods described herein include multiple myeloma, Hodgkin's lymphoma or non-Hodgkin's lymphoma.

[0152] The terms “tumor” and “cancer” are used interchangeably herein, e.g., both terms encompass solid and liquid, e.g., diffuse or circulating, tumors. As used herein, the term “cancer” or “tumor” includes premalignant, as well as malignant cancers and tumors.

[0153] “Derived from” as that term is used herein, indicates a relationship between a first and a second molecule. It generally refers to structural similarity between the first molecule and a second molecule and does not connotate or include a process or source limitation on a first molecule that is derived from a second molecule. For example, in the case of an intracellular signaling domain that is derived from a CD3zeta molecule, the intracellular signaling domain retains sufficient CD3zeta structure such that is has the required function, namely, the ability to generate a signal under the appropriate conditions. It does not connotate or include a limitation to a particular process of producing the intracellular signaling domain, e.g., it does not mean that, to provide the intracellular signaling domain, one must start with a CD3zeta sequence and delete unwanted sequence, or impose mutations, to arrive at the intracellular signaling domain.

[0154] The phrase “disease associated with expression of an antigen, e.g., a tumor antigen” includes, but is not limited to, a disease associated with a cell which expresses the antigen (e.g., wild-type or mutant antigen) or condition associated with a cell which expresses the antigen (e.g., wild-type or mutant antigen) including, e.g., proliferative diseases such as a cancer or malignancy or a precancerous condition such as a myelodysplasia, a myelodysplastic syndrome or a preleukemia; or a noncancer related indication associated with a cell which expresses the antigen (e.g., wild-type or mutant antigen). For the avoidance of doubt, a disease associated with expression of the antigen may include a condition associated with a cell which does not presently express the antigen, e.g., because expression of the antigen has been downregulated, e.g., due to treatment with a molecule targeting the antigen, but which at one time expressed the antigen. In some embodiments, the disease associated with expression of an antigen, e.g., a tumor antigen is a cancer (e.g., a solid cancer or a hematological cancer), a viral infection (e.g., HIV, a fungal infection, e.g., C. neoformans), an autoimmune disease (e.g. rheumatoid arthritis, system lupus erythematosus (SLE or lupus), pemphigus vulgaris, and Sjogren's syndrome; inflammatory bowel disease, ulcerative colitis; transplant-related allospecific immunity disorders related to mucosal immunity; and unwanted immune responses towards biologics (e.g., Factor VIII) where humoral immunity is important).

[0155] The term “conservative sequence modifications” refers to amino acid modifications that do not significantly affect or alter the binding characteristics of the antibody or antibody fragment containing the amino acid sequence. Such conservative modifications include amino acid substitutions, additions and deletions. Modifications can be introduced into an antibody or antibody fragment of the invention by standard techniques known in the art, such as site-directed mutagenesis and PCR-mediated mutagenesis. Conservative substitutions are ones in which the amino acid residue is replaced with an amino acid residue having a similar side chain Families of amino acid residues having similar side chains have been defined in the art. These families include amino acids with basic side chains (e.g., lysine, arginine, histidine), acidic side chains (e.g., aspartic acid, glutamic acid), uncharged polar side chains (e.g., glycine, asparagine, glutamine, serine, threonine, tyrosine, cysteine, tryptophan), nonpolar side chains (e.g., alanine, valine, leucine, isoleucine, proline, phenylalanine, methionine), beta-branched side chains (e.g., threonine, valine, isoleucine) and aromatic side chains (e.g., tyrosine, phenylalanine, tryptophan, histidine). Thus, one or more amino acid residues within a CAR of the invention can be replaced with other amino acid residues from the same side chain family and the altered CAR can be tested using the functional assays described herein.

[0156] The term “stimulation,” refers to a primary response induced by binding of a stimulatory molecule (e.g., a TCR/CD3 complex) with its cognate ligand thereby mediating a signal transduction event, such as, but not limited to, signal transduction via the TCR/CD3 complex. Stimulation can mediate altered expression of certain molecules, such as downregulation of TGF-β, and/or reorganization of cytoskeletal structures, and the like.

[0157] The term “stimulatory molecule,” refers to a molecule expressed by a T cell that provides the primary cytoplasmic signaling sequence(s) that regulate primary activation of the TCR complex in a stimulatory way for at least some aspect of the T cell signaling pathway. In some embodiments, the ITAM-containing domain within the CAR recapitulates the signaling of the primary TCR independently of endogenous TCR complexes. In one aspect, the primary signal is initiated by, for instance, binding of a TCR/CD3 complex with an MHC molecule loaded with peptide, and which leads to mediation of a T cell response, including, but not limited to, proliferation, activation, differentiation, and the like. A primary cytoplasmic signaling sequence (also referred to as a “primary signaling domain”) that acts in a stimulatory manner may contain a signaling motif which is known as immunoreceptor tyrosine-based activation motif or ITAM. Examples of an ITAM containing primary cytoplasmic signaling sequence that is of particular use in the invention includes, but is not limited to, those derived from TCR zeta, FcR gamma, FcR beta, CD3 gamma, CD3 delta, CD3 epsilon, CD5, CD22, CD79a, CD79b, CD278 (also known as “ICOS”), FcεRI and CD66d, DAP10 and DAP12. In a specific CAR of the invention, the intracellular signaling domain in any one or more CARS of the invention comprises an intracellular signaling sequence, e.g., a primary signaling sequence of CD3-zeta. The term “antigen presenting cell” or “APC” refers to an immune system cell such as an accessory cell (e.g., a B-cell, a dendritic cell, and the like) that displays a foreign antigen complexed with major histocompatibility complexes (MHC's) on its surface. T-cells may recognize these complexes using their T-cell receptors (TCRs). APCs process antigens and present them to T-cells.

[0158] An “intracellular signaling domain,” as the term is used herein, refers to an intracellular portion of a molecule. In embodiments, the intracellular signal domain transduces the effector function signal and directs the cell to perform a specialized function. While the entire intracellular signaling domain can be employed, in many cases it is not necessary to use the entire chain. To the extent that a truncated portion of the intracellular signaling domain is used, such truncated portion may be used in place of the intact chain as long as it transduces the effector function signal. The term intracellular signaling domain is thus meant to include any truncated portion of the intracellular signaling domain sufficient to transduce the effector function signal.

[0159] The intracellular signaling domain generates a signal that promotes an immune effector function of the CAR containing cell, e.g., a CART cell. Examples of immune effector function, e.g., in a CART cell, include cytolytic activity and helper activity, including the secretion of cytokines.

[0160] In an embodiment, the intracellular signaling domain can comprise a primary intracellular signaling domain. Exemplary primary intracellular signaling domains include those derived from the molecules responsible for primary stimulation, or antigen dependent simulation. In an embodiment, the intracellular signaling domain can comprise a costimulatory intracellular domain. Exemplary costimulatory intracellular signaling domains include those derived from molecules responsible for costimulatory signals, or antigen independent stimulation. For example, in the case of a CART, a primary intracellular signaling domain can comprise a cytoplasmic sequence of a T cell receptor, and a costimulatory intracellular signaling domain can comprise cytoplasmic sequence from co-receptor or costimulatory molecule.

[0161] A primary intracellular signaling domain can comprise a signaling motif which is known as an immunoreceptor tyrosine-based activation motif or ITAM. Examples of ITAM containing primary cytoplasmic signaling sequences include, but are not limited to, those derived from CD3 zeta, FcR gamma, FcR beta, CD3 gamma, CD3 delta, CD3 epsilon, CD5, CD22, CD79a, CD79b, CD278 (also known as “ICOS”), FcεRI, CD66d, DAP10 and DAP12.

[0162] The term “zeta” or alternatively “zeta chain”, “CD3-zeta” or “TCR-zeta” refers to CD247. Swiss-Prot accession number P20963 provides exemplary human CD3 zeta amino acid sequences. A “zeta stimulatory domain” or alternatively a “CD3-zeta stimulatory domain” or a “TCR-zeta stimulatory domain” refers to a stimulatory domain of CD3-zeta or a variant thereof (e.g., a molecule having mutations, e.g., point mutations, fragments, insertions, or deletions). In one embodiment, the cytoplasmic domain of zeta comprises residues 52 through 164 of GenBank Acc. No. BAG36664.1 or a variant thereof (e.g., a molecule having mutations, e.g., point mutations, fragments, insertions, or deletions). In one embodiment, the “zeta stimulatory domain” or a “CD3-zeta stimulatory domain” is the sequence provided as SEQ ID NO: 1034 or 1037 or a variant thereof (e.g., a molecule having mutations, e.g., point mutations, fragments, insertions, or deletions).

[0163] The term “costimulatory molecule” refers to the cognate binding partner on a T cell that specifically binds with a costimulatory ligand, thereby mediating a costimulatory response by the T cell, such as, but not limited to, proliferation. Costimulatory molecules are cell surface molecules other than antigen receptors or their ligands that are required for an efficient immune response. Costimulatory molecules include, but are not limited to an MHC class I molecule, TNF receptor proteins, Immunoglobulin-like proteins, cytokine receptors, integrins, signaling lymphocytic activation molecules (SLAM proteins), activating NK cell receptors, BTLA, Toll ligand receptor, OX40, CD2, CD7, CD27, CD28, CD30, CD40, CD5, ICAM-1, LFA-1 (CD11a/CD18), 4-1BB (CD137), B7-H3, CD5, ICAM-1, ICOS (CD278), GITR, BAFFR, LIGHT, HVEM (LIGHTR), KIRDS2, SLAMF7, NKp80 (KLRF1), NKp44, NKp30, NKp46, CD19, CD4, CD8alpha, CD8beta, IL2R beta, IL2R gamma, IL7R alpha, ITGA4, VLA1, CD49a, ITGA4, IA4, CD49D, ITGA6, VLA-6, CD49f, ITGAD, CD11d, ITGAE, CD103, ITGAL, CD11a, LFA-1, ITGAM, CD11b, ITGAX, CD11c, ITGB1, CD29, ITGB2, CD18, LFA-1, ITGB7, NKG2D, NKG2C, TNFR2, TRANCE/RANKL, DNAM1 (CD226), SLAMF4 (CD244, 2B4), CD84, CD96 (Tactile), CEACAM1, CRTAM, Ly9 (CD229), CD160 (BY55), PSGL1, CD100 (SEMA4D), CD69, SLAMF6 (NTB-A, Ly108), SLAM (SLAMF1, CD150, IPO-3), BLAME (SLAMF8), SELPLG (CD162), LTBR, LAT, GADS, SLP-76, PAG/Cbp, CD19a, CD28-OX40, CD28-4-1BB, and a ligand that specifically binds with CD83.

[0164] A costimulatory intracellular signaling domain refers to the intracellular portion of a costimulatory molecule.

[0165] The intracellular signaling domain can comprise the entire intracellular portion, or the entire native intracellular signaling domain, of the molecule from which it is derived, or a functional fragment thereof.

[0166] The term “4-1BB” refers to CD137 or Tumor necrosis factor receptor superfamily member 9. Swiss-Prot accession number P20963 provides exemplary human 4-1BB amino acid sequences. A “4-1BB costimulatory domain” refers to a costimulatory domain of 4-1BB, or a variant thereof (e.g., a molecule having mutations, e.g., point mutations, fragments, insertions, or deletions). In one embodiment, the “4-1BB costimulatory domain” is the sequence provided as SEQ ID NO: 1029 or a variant thereof (e.g., a molecule having mutations, e.g., point mutations, fragments, insertions, or deletions).

[0167] “Immune effector cell,” as that term is used herein, refers to a cell that is involved in an immune response, e.g., in the promotion of an immune effector response. Examples of immune effector cells include T cells, e.g., alpha/beta T cells and gamma/delta T cells, B cells, natural killer (NK) cells, natural killer T (NKT) cells, mast cells, and myeloic-derived phagocytes.

[0168] “Immune effector function or immune effector response,” as that term is used herein, refers to function or response, e.g., of an immune effector cell, that enhances or promotes an immune attack of a target cell. E.g., an immune effector function or response refers a property of a T or NK cell that promotes killing or the inhibition of growth or proliferation, of a target cell. In the case of a T cell, primary stimulation and co-stimulation are examples of immune effector function or response.

[0169] The term “effector function” refers to a specialized function of a cell. Effector function of a T cell, for example, may be cytolytic activity or helper activity including the secretion of cytokines.

[0170] The term “encoding” refers to the inherent property of specific sequences of nucleotides in a polynucleotide, such as a gene, a cDNA, or an mRNA, to serve as templates for synthesis of other polymers and macromolecules in biological processes having either a defined sequence of nucleotides (e.g., rRNA, tRNA and mRNA) or a defined sequence of amino acids and the biological properties resulting therefrom. Thus, a gene, cDNA, or RNA, encodes a protein if transcription and translation of mRNA corresponding to that gene produces the protein in a cell or other biological system. Both the coding strand, the nucleotide sequence of which is identical to the mRNA sequence and is usually provided in sequence listings, and the non-coding strand, used as the template for transcription of a gene or cDNA, can be referred to as encoding the protein or other product of that gene or cDNA.

[0171] Unless otherwise specified, a “nucleotide sequence encoding an amino acid sequence” includes all nucleotide sequences that are degenerate versions of each other and that encode the same amino acid sequence. The phrase nucleotide sequence that encodes a protein or a RNA may also include introns to the extent that the nucleotide sequence encoding the protein may in some version contain an intron(s).

[0172] The term “effective amount” or “therapeutically effective amount” are used interchangeably herein, and refer to an amount of a compound, formulation, material, or composition, as described herein effective to achieve a particular biological result.

[0173] The term “endogenous” refers to any material from or produced inside an organism, cell, tissue or system.

[0174] The term “exogenous” refers to any material introduced from or produced outside an organism, cell, tissue or system.

[0175] The term “expression” refers to the transcription and/or translation of a particular nucleotide sequence. In some embodiments, expression comprises translation of an mRNA introduced into a cell.

[0176] The term “transfer vector” refers to a composition of matter which comprises an isolated nucleic acid and which can be used to deliver the isolated nucleic acid to the interior of a cell. Numerous vectors are known in the art including, but not limited to, linear polynucleotides, polynucleotides associated with ionic or amphiphilic compounds, plasmids, and viruses. Thus, the term “transfer vector” includes an autonomously replicating plasmid or a virus. The term should also be construed to further include non-plasmid and non-viral compounds which facilitate transfer of nucleic acid into cells, such as, for example, a polylysine compound, liposome, and the like. Examples of viral transfer vectors include, but are not limited to, adenoviral vectors, adeno-associated virus vectors, retroviral vectors, lentiviral vectors, and the like.

[0177] The term “expression vector” refers to a vector comprising a recombinant polynucleotide comprising expression control sequences operatively linked to a nucleotide sequence to be expressed. An expression vector comprises sufficient cis-acting elements for expression; other elements for expression can be supplied by the host cell or in an in vitro expression system. Expression vectors include all those known in the art, including cosmids, plasmids (e.g., naked or contained in liposomes) and viruses (e.g., lentiviruses, retroviruses, adenoviruses, and adeno-associated viruses) that incorporate the recombinant polynucleotide.

[0178] The term “lentivirus” refers to a genus of the Retroviridae family. Lentiviruses are unique among the retroviruses in being able to infect non-dividing cells; they can deliver a significant amount of genetic information into the DNA of the host cell, so they are one of the most efficient methods of a gene delivery vector. HIV, SIV, and FIV are all examples of lentiviruses.

[0179] The term “lentiviral vector” refers to a vector derived from at least a portion of a lentivirus genome, including especially a self-inactivating lentiviral vector as provided in Milone et al., Mol. Ther. 17(8): 1453-1464 (2009). Other examples of lentivirus vectors that may be used in the clinic, include but are not limited to, e.g., the LENTIVECTOR® gene delivery technology from Oxford BioMedica, the LENTIMAX™ vector system from Lentigen and the like. Nonclinical types of lentiviral vectors are also available and would be known to one skilled in the art.

[0180] The term “homologous” or “identity” refers to the subunit sequence identity between two polymeric molecules, e.g., between two nucleic acid molecules, such as, two DNA molecules or two RNA molecules, or between two polypeptide molecules. When a subunit position in both of the two molecules is occupied by the same monomeric subunit; e.g., if a position in each of two DNA molecules is occupied by adenine, then they are homologous or identical at that position. The homology between two sequences is a direct function of the number of matching or homologous positions; e.g., if half (e.g., five positions in a polymer ten subunits in length) of the positions in two sequences are homologous, the two sequences are 50% homologous; if 90% of the positions (e.g., 9 of 10), are matched or homologous, the two sequences are 90% homologous.

[0181] “Humanized” forms of non-human (e.g., murine) antibodies are chimeric immunoglobulins, immunoglobulin chains or fragments thereof (such as Fv, Fab, Fab′, F(ab′)2 or other antigen-binding subsequences of antibodies) which contain minimal sequence derived from non-human immunoglobulin. For the most part, humanized antibodies and antibody fragments thereof are human immunoglobulins (recipient antibody or antibody fragment) in which residues from a complementarity-determining region (CDR) of the recipient are replaced by residues from a CDR of a non-human species (donor antibody) such as mouse, rat or rabbit having the desired specificity, affinity, and capacity. In some instances, Fv framework region (FR) residues of the human immunoglobulin are replaced by corresponding non-human residues. Furthermore, a humanized antibody/antibody fragment can comprise residues which are found neither in the recipient antibody nor in the imported CDR or framework sequences. These modifications can further refine and optimize antibody or antibody fragment performance. In general, the humanized antibody or antibody fragment thereof will comprise substantially all of at least one, and typically two, variable domains, in which all or substantially all of the CDR regions correspond to those of a non-human immunoglobulin and all or a significant portion of the FR regions are those of a human immunoglobulin sequence. The humanized antibody or antibody fragment can also comprise at least a portion of an immunoglobulin constant region (Fc), typically that of a human immunoglobulin. For further details, see Jones et al., Nature, 321: 522-525, 1986; Reichmann et al., Nature, 332: 323-329, 1988; Presta, Curr. Op. Struct. Biol., 2: 593-596, 1992.

[0182] “Fully human” refers to an immunoglobulin, such as an antibody or antibody fragment, where the whole molecule is of human origin or consists of an amino acid sequence identical to a human form of the antibody or immunoglobulin.

[0183] The term “isolated” means altered or removed from the natural state. For example, a nucleic acid or a peptide naturally present in a living animal is not “isolated,” but the same nucleic acid or peptide partially or completely separated from the coexisting materials of its natural state is “isolated.” An isolated nucleic acid or protein can exist in substantially purified form, or can exist in a non-native environment such as, for example, a host cell.

[0184] In the context of the present invention, the following abbreviations for the commonly occurring nucleic acid bases are used. “A” refers to adenosine, “C” refers to cytosine, “G” refers to guanosine, “T” refers to thymidine, and “U” refers to uridine.

[0185] The term “operably linked” or “transcriptional control” refers to functional linkage between a regulatory sequence and a heterologous nucleic acid sequence resulting in expression of the latter. For example, a first nucleic acid sequence is operably linked with a second nucleic acid sequence when the first nucleic acid sequence is placed in a functional relationship with the second nucleic acid sequence. For instance, a promoter is operably linked to a coding sequence if the promoter affects the transcription or expression of the coding sequence. Operably linked DNA sequences can be contiguous with each other and, e.g., where necessary to join two protein coding regions, are in the same reading frame.

[0186] The term “parenteral” administration of an immunogenic composition includes, e.g., subcutaneous (s.c.), intravenous (i.v.), intramuscular (i.m.), or intrasternal injection, intratumoral, or infusion techniques.

[0187] The term “nucleic acid” or “polynucleotide” refers to deoxyribonucleic acids (DNA) or ribonucleic acids (RNA) and polymers thereof in either single- or double-stranded form. Unless specifically limited, the term encompasses nucleic acids containing known analogues of natural nucleotides that have similar binding properties as the reference nucleic acid and are metabolized in a manner similar to naturally occurring nucleotides. Unless otherwise indicated, a particular nucleic acid sequence also implicitly encompasses conservatively modified variants thereof (e.g., degenerate codon substitutions, e.g., conservative substitutions), alleles, orthologs, SNPs, and complementary sequences as well as the sequence explicitly indicated. Specifically, degenerate codon substitutions, e.g., conservative substitutions may be achieved by generating sequences in which the third position of one or more selected (or all) codons is substituted with mixed-base and/or deoxyinosine residues (Batzer et al., Nucleic Acid Res. 19:5081 (1991); Ohtsuka et al., J. Biol. Chem. 260:2605-2608 (1985); and Rossolini et al., Mol. Cell. Probes 8:91-98 (1994)).

[0188] The terms “peptide,” “polypeptide,” and “protein” are used interchangeably, and refer to a compound comprised of amino acid residues covalently linked by peptide bonds. A protein or peptide must contain at least two amino acids, and no limitation is placed on the maximum number of amino acids that can comprise a protein's or peptide's sequence. Polypeptides include any peptide or protein comprising two or more amino acids joined to each other by peptide bonds. As used herein, the term refers to both short chains, which also commonly are referred to in the art as peptides, oligopeptides and oligomers, for example, and to longer chains, which generally are referred to in the art as proteins, of which there are many types. “Polypeptides” include, for example, biologically active fragments, substantially homologous polypeptides, oligopeptides, homodimers, heterodimers, variants of polypeptides, modified polypeptides, derivatives, analogs, fusion proteins, among others. A polypeptide includes a natural peptide, a recombinant peptide, or a combination thereof.

[0189] The term “promoter” refers to a DNA sequence recognized by the synthetic machinery of the cell, or introduced synthetic machinery, required to initiate the specific transcription of a polynucleotide sequence.

[0190] The term “promoter/regulatory sequence” refers to a nucleic acid sequence which is required for expression of a gene product operably linked to the promoter/regulatory sequence. In some instances, this sequence may be the core promoter sequence and in other instances, this sequence may also include an enhancer sequence and other regulatory elements which are required for expression of the gene product. The promoter/regulatory sequence may, for example, be one which expresses the gene product in a tissue specific manner.

[0191] The term “constitutive” promoter refers to a nucleotide sequence which, when operably linked with a polynucleotide which encodes or specifies a gene product, causes the gene product to be produced in a cell under most or all physiological conditions of the cell.

[0192] The term “inducible” promoter refers to a nucleotide sequence which, when operably linked with a polynucleotide which encodes or specifies a gene product, causes the gene product to be produced in a cell substantially only when an inducer which corresponds to the promoter is present in the cell.

[0193] The term “tissue-specific” promoter refers to a nucleotide sequence which, when operably linked with a polynucleotide encodes or specified by a gene, causes the gene product to be produced in a cell substantially only if the cell is a cell of the tissue type corresponding to the promoter.

[0194] The terms “cancer associated antigen” or “tumor antigen” interchangeably refers to a molecule (typically a protein, carbohydrate or lipid) that is expressed on the surface of a cancer cell, either entirely or as a fragment (e.g., MHC/peptide), and which is useful for the preferential targeting of a pharmacological agent to the cancer cell. In some embodiments, a tumor antigen is a marker expressed by both normal cells and cancer cells, e.g., a lineage marker, e.g., CD19 on B cells. In some embodiments, a tumor antigen is a cell surface molecule that is overexpressed in a cancer cell in comparison to a normal cell, for instance, 1-fold over expression, 2-fold overexpression, 3-fold overexpression or more in comparison to a normal cell. In some embodiments, a tumor antigen is a cell surface molecule that is inappropriately synthesized in the cancer cell, for instance, a molecule that contains deletions, additions or mutations in comparison to the molecule expressed on a normal cell. In some embodiments, a tumor antigen will be expressed exclusively on the cell surface of a cancer cell, entirely or as a fragment (e.g., MHC/peptide), and not synthesized or expressed on the surface of a normal cell. In some embodiments, the CARs of the present invention includes CARs comprising an antigen binding domain (e.g., antibody or antibody fragment) that binds to a MHC presented peptide. Normally, peptides derived from endogenous proteins fill the pockets of Major histocompatibility complex (MHC) class I molecules, and are recognized by T cell receptors (TCRs) on CD8+T lymphocytes. The MHC class I complexes are constitutively expressed by all nucleated cells. In cancer, virus-specific and/or tumor-specific peptide/MHC complexes represent a unique class of cell surface targets for immunotherapy. TCR-like antibodies targeting peptides derived from viral or tumor antigens in the context of human leukocyte antigen (HLA)-A1 or HLA-A2 have been described (see, e.g., Sastry et al., J Virol. 2011 85(5):1935-1942; Sergeeva et al., Blood, 2011 117(16):4262-4272; Verma et al., J Immunol 2010 184(4):2156-2165; Willemsen et al., Gene Ther 2001 8(21):1601-1608; Dao et al., Sci Transl Med 2013 5(176):176ra33; Tassev et al., Cancer Gene Ther 2012 19(2):84-100). For example, TCR-like antibody can be identified from screening a library, such as a human scFv phage displayed library.

[0195] The term “tumor-supporting antigen” or “cancer-supporting antigen” interchangeably refer to a molecule (typically a protein, carbohydrate or lipid) that is expressed on the surface of a cell that is, itself, not cancerous, but supports the cancer cells, e.g., by promoting their growth or survival e.g., resistance to immune cells. Exemplary cells of this type include stromal cells and myeloid-derived suppressor cells (MDSCs). The tumor-supporting antigen itself need not play a role in supporting the tumor cells so long as the antigen is present on a cell that supports cancer cells.

[0196] The term “flexible polypeptide linker” or “linker” as used in the context of an scFv refers to a peptide linker that consists of amino acids such as glycine and/or serine residues used alone or in combination, to link variable heavy and variable light chain regions together. In one embodiment, the flexible polypeptide linker is a Gly/Ser linker and comprises the amino acid sequence (Gly-Gly-Gly-Ser)n, where n is a positive integer equal to or greater than 1. For example, n=1, n=2, n=3. n=4, n=5 and n=6, n=7, n=8, n=9 and n=10 (SEQ ID NO: 1009). In one embodiment, the flexible polypeptide linkers include, but are not limited to, (Gly4 Ser)4 (SEQ ID NO: 1010) or (Gly4 Ser)3 (SEQ ID NO: 1011). In another embodiment, the linkers include multiple repeats of (Gly2Ser), (GlySer) or (Gly3Ser) (SEQ ID NO: 1012). Also included within the scope of the invention are linkers described in WO2012/138475, incorporated herein by reference.

[0197] As used herein, a 5′ cap (also termed an RNA cap, an RNA 7-methylguanosine cap or an RNA m7G cap) is a modified guanine nucleotide that has been added to the “front” or 5′ end of a eukaryotic messenger RNA shortly after the start of transcription. The 5′ cap consists of a terminal group which is linked to the first transcribed nucleotide. Its presence is critical for recognition by the ribosome and protection from RNases. Cap addition is coupled to transcription, and occurs co-transcriptionally, such that each influences the other. Shortly after the start of transcription, the 5′ end of the mRNA being synthesized is bound by a cap-synthesizing complex associated with RNA polymerase. This enzymatic complex catalyzes the chemical reactions that are required for mRNA capping. Synthesis proceeds as a multi-step biochemical reaction. The capping moiety can be modified to modulate functionality of mRNA such as its stability or efficiency of translation.

[0198] As used herein, “in vitro transcribed RNA” refers to RNA, preferably mRNA, that has been synthesized in vitro. Generally, the in vitro transcribed RNA is generated from an in vitro transcription vector. The in vitro transcription vector comprises a template that is used to generate the in vitro transcribed RNA.

[0199] As used herein, a “poly(A)” is a series of adenosines attached by polyadenylation to the mRNA. In the preferred embodiment of a construct for transient expression, the polyA is between 50 and 5000 (SEQ ID NO: 1013), preferably greater than 64, more preferably greater than 100, most preferably greater than 300 or 400. poly(A) sequences can be modified chemically or enzymatically to modulate mRNA functionality such as localization, stability or efficiency of translation.

[0200] As used herein, “polyadenylation” refers to the covalent linkage of a polyadenylyl moiety, or its modified variant, to a messenger RNA molecule. In eukaryotic organisms, most messenger RNA (mRNA) molecules are polyadenylated at the 3′ end. The 3′ poly(A) tail is a long sequence of adenine nucleotides (often several hundred) added to the pre-mRNA through the action of an enzyme, polyadenylate polymerase. In higher eukaryotes, the poly(A) tail is added onto transcripts that contain a specific sequence, the polyadenylation signal. The poly(A) tail and the protein bound to it aid in protecting mRNA from degradation by exonucleases. Polyadenylation is also important for transcription termination, export of the mRNA from the nucleus, and translation. Polyadenylation occurs in the nucleus immediately after transcription of DNA into RNA, but additionally can also occur later in the cytoplasm. After transcription has been terminated, the mRNA chain is cleaved through the action of an endonuclease complex associated with RNA polymerase. The cleavage site is usually characterized by the presence of the base sequence AAUAAA near the cleavage site. After the mRNA has been cleaved, adenosine residues are added to the free 3′ end at the cleavage site.

[0201] As used herein, “transient” refers to expression of a non-integrated transgene for a period of hours, days or weeks, wherein the period of time of expression is less than the period of time for expression of the gene if integrated into the genome or contained within a stable plasmid replicon in the host cell.

[0202] As used herein, the terms “treat”, “treatment” and “treating” refer to the reduction or amelioration of the progression, severity and/or duration of a proliferative disorder, or the amelioration of one or more symptoms (preferably, one or more discernible symptoms) of a proliferative disorder resulting from the administration of one or more therapies (e.g., one or more therapeutic agents such as a CAR of the invention). In specific embodiments, the terms “treat”, “treatment” and “treating” refer to the amelioration of at least one measurable physical parameter of a proliferative disorder, such as growth of a tumor, not necessarily discernible by the patient. In other embodiments the terms “treat”, “treatment” and “treating”—refer to the inhibition of the progression of a proliferative disorder, either physically by, e.g., stabilization of a discernible symptom, physiologically by, e.g., stabilization of a physical parameter, or both. In other embodiments the terms “treat”, “treatment” and “treating” refer to the reduction or stabilization of tumor size or cancerous cell count.

[0203] The term “signal transduction pathway” refers to the biochemical relationship between a variety of signal transduction molecules that play a role in the transmission of a signal from one portion of a cell to another portion of a cell. The phrase “cell surface receptor” includes molecules and complexes of molecules capable of receiving a signal and transmitting signal across the membrane of a cell.

[0204] The term “subject” is intended to include living organisms in which an immune response can be elicited (e.g., mammals, human).

[0205] The term, a “substantially purified” cell refers to a cell that is essentially free of other cell types. A substantially purified cell also refers to a cell which has been separated from other cell types with which it is normally associated in its naturally occurring state. In some instances, a population of substantially purified cells refers to a homogenous population of cells. In other instances, this term refers simply to cell that have been separated from the cells with which they are naturally associated in their natural state. In some aspects, the cells are cultured in vitro. In other aspects, the cells are not cultured in vitro.

[0206] The term “therapeutic” as used herein means a treatment. A therapeutic effect is obtained by reduction, suppression, remission, or eradication of a disease state.

[0207] The term “prophylaxis” as used herein means the prevention of or protective treatment for a disease or disease state.

[0208] In the context of the present invention, “tumor antigen” or “hyperproliferative disorder antigen” or “antigen associated with a hyperproliferative disorder” refers to antigens that are common to specific hyperproliferative disorders. In certain aspects, the hyperproliferative disorder antigens of the present invention are derived from, cancers including but not limited to primary or metastatic melanoma, thymoma, lymphoma, sarcoma, lung cancer, liver cancer, non-Hodgkin lymphoma, Hodgkin lymphoma, leukemias, uterine cancer, cervical cancer, bladder cancer, kidney cancer and adenocarcinomas such as breast cancer, prostate cancer (e.g., castrate-resistant or therapy-resistant prostate cancer, or metastatic prostate cancer), ovarian cancer, pancreatic cancer, and the like, or a plasma cell proliferative disorder, e.g., asymptomatic myeloma (smoldering multiple myeloma or indolent myeloma), monoclonal gammapathy of undetermined significance (MGUS), Waldenstrom's macroglobulinemia, plasmacytomas (e.g., plasma cell dyscrasia, solitary myeloma, solitary plasmacytoma, extramedullary plasmacytoma, and multiple plasmacytoma), systemic amyloid light chain amyloidosis, and POEMS syndrome (also known as Crow-Fukase syndrome, Takatsuki disease, and PEP syndrome).

[0209] The term “transfected” or “transformed” or “transduced” refers to a process by which exogenous nucleic acid is transferred or introduced into the host cell. A “transfected” or “transformed” or “transduced” cell is one which has been transfected, transformed or transduced with exogenous nucleic acid. The cell includes the primary subject cell and its progeny.

[0210] The term “specifically binds,” refers to an antibody, or a ligand, which recognizes and binds with a cognate binding partner (e.g., a stimulatory and/or costimulatory molecule present on a T cell) protein present in a sample, but which antibody or ligand does not substantially recognize or bind other molecules in the sample.

[0211] “Regulatable chimeric antigen receptor (RCAR),” as used herein, refers to a set of polypeptides, typically two in the simplest embodiments, which when in an immune effector cell, provides the cell with specificity for a target cell, typically a cancer cell, and with intracellular signal generation. In some embodiments, an RCAR comprises at least an extracellular antigen binding domain, a transmembrane domain and a cytoplasmic signaling domain (also referred to herein as “an intracellular signaling domain”) comprising a functional signaling domain derived from a stimulatory molecule and/or costimulatory molecule as defined herein in the context of a CAR molecule. In some embodiments, the set of polypeptides in the RCAR are not contiguous with each other, e.g., are in different polypeptide chains. In some embodiments, the RCAR includes a dimerization switch that, upon the presence of a dimerization molecule, can couple the polypeptides to one another, e.g., can couple an antigen binding domain to an intracellular signaling domain. In some embodiments, the RCAR is expressed in a cell (e.g., an immune effector cell) as described herein, e.g., an RCAR-expressing cell (also referred to herein as “RCARX cell”). In an embodiment the RCARX cell is a T cell, and is referred to as a RCART cell. In an embodiment the RCARX cell is an NK cell, and is referred to as a RCARN cell. The RCAR can provide the RCAR-expressing cell with specificity for a target cell, typically a cancer cell, and with regulatable intracellular signal generation or proliferation, which can optimize an immune effector property of the RCAR-expressing cell. In embodiments, an RCAR cell relies at least in part, on an antigen binding domain to provide specificity to a target cell that comprises the antigen bound by the antigen binding domain.

[0212] “Membrane anchor” or “membrane tethering domain”, as that term is used herein, refers to a polypeptide or moiety, e.g., a myristoyl group, sufficient to anchor an extracellular or intracellular domain to the plasma membrane.

[0213] “Switch domain,” as that term is used herein, e.g., when referring to an RCAR, refers to an entity, typically a polypeptide-based entity, that, in the presence of a dimerization molecule, associates with another switch domain. The association results in a functional coupling of a first entity linked to, e.g., fused to, a first switch domain, and a second entity linked to, e.g., fused to, a second switch domain A first and second switch domain are collectively referred to as a dimerization switch. In embodiments, the first and second switch domains are the same as one another, e.g., they are polypeptides having the same primary amino acid sequence, and are referred to collectively as a homodimerization switch. In embodiments, the first and second switch domains are different from one another, e.g., they are polypeptides having different primary amino acid sequences, and are referred to collectively as a heterodimerization switch. In embodiments, the switch is intracellular. In embodiments, the switch is extracellular. In embodiments, the switch domain is a polypeptide-based entity, e.g., FKBP or FRB-based, and the dimerization molecule is small molecule, e.g., a rapalogue. In embodiments, the switch domain is a polypeptide-based entity, e.g., an scFv that binds a myc peptide, and the dimerization molecule is a polypeptide, a fragment thereof, or a multimer of a polypeptide, e.g., a myc ligand or multimers of a myc ligand that bind to one or more myc scFvs. In embodiments, the switch domain is a polypeptide-based entity, e.g., myc receptor, and the dimerization molecule is an antibody or fragments thereof, e.g., myc antibody.

[0214] “Dimerization molecule,” as that term is used herein, e.g., when referring to an RCAR, refers to a molecule that promotes the association of a first switch domain with a second switch domain. In embodiments, the dimerization molecule does not naturally occur in the subject, or does not occur in concentrations that would result in significant dimerization. In embodiments, the dimerization molecule is a small molecule, e.g., rapamycin or a rapalogue, e.g, RAD001.

[0215] The term “bioequivalent” refers to an amount of an agent other than the reference compound (e.g., RAD001), required to produce an effect equivalent to the effect produced by the reference dose or reference amount of the reference compound (e.g., RAD001). In an embodiment the effect is the level of mTOR inhibition, e.g., as measured by P70 S6 kinase inhibition, e.g., as evaluated in an in vivo or in vitro assay, e.g., as measured by an assay described herein, e.g., the Boulay assay, or measurement of phosphorylated S6 levels by western blot. In an embodiment, the effect is alteration of the ratio of PD-1 positive/PD-1 negative T cells, as measured by cell sorting. In an embodiment a bioequivalent amount or dose of an mTOR inhibitor is the amount or dose that achieves the same level of P70 S6 kinase inhibition as does the reference dose or reference amount of a reference compound. In an embodiment, a bioequivalent amount or dose of an mTOR inhibitor is the amount or dose that achieves the same level of alteration in the ratio of PD-1 positive/PD-1 negative T cells as does the reference dose or reference amount of a reference compound.

[0216] The term “low, immune enhancing, dose” when used in conjuction with an mTOR inhibitor, e.g., an allosteric mTOR inhibitor, e.g., RAD001 or rapamycin, or a catalytic mTOR inhibitor, refers to a dose of mTOR inhibitor that partially, but not fully, inhibits mTOR activity, e.g., as measured by the inhibition of P70 S6 kinase activity. Methods for evaluating mTOR activity, e.g., by inhibition of P70 S6 kinase, are discussed herein. The dose is insufficient to result in complete immune suppression but is sufficient to enhance the immune response. In an embodiment, the low, immune enhancing, dose of mTOR inhibitor results in a decrease in the number of PD-1 positive immune effector cells, e.g., T cells or NK cells, and/or an increase in the number of PD-1 negative immune effector cells, e.g., T cells or NK cells, or an increase in the ratio of PD-1 negative immune effector cells (e.g., T cells or NK cells)/PD-1 positive immune effector cells (e.g., T cells or NK cells).

[0217] In an embodiment, the low, immune enhancing, dose of mTOR inhibitor results in an increase in the number of naive T cells. In an embodiment, the low, immune enhancing, dose of mTOR inhibitor results in one or more of the following:

[0218] an increase in the expression of one or more of the following markers: CD62Lhigh, CD127high, CD27+, and BCL2, e.g., on memory T cells, e.g., memory T cell precursors;

[0219] a decrease in the expression of KLRG1, e.g., on memory T cells, e.g., memory T cell precursors; and

[0220] an increase in the number of memory T cell precursors, e.g., cells with any one or combination of the following characteristics: increased CD62Lhigh, increased CD127high, increased CD27+, decreased KLRG1, and increased BCL2;

[0221] wherein any of the changes described above occurs, e.g., at least transiently, e.g., as compared to a non-treated subject.

[0222] “Refractory” as used herein refers to a disease, e.g., cancer, that does not respond to a treatment. In embodiments, a refractory cancer can be resistant to a treatment before or at the beginning of the treatment. In other embodiments, the refractory cancer can become resistant during a treatment. A refractory cancer is also called a resistant cancer.

[0223] “Relapsed” or a “relapse” as used herein refers to the reappearance of a disease (e.g., cancer) or the signs and symptoms of a disease such as cancer after a period of improvement or responsiveness, e.g., after prior treatment of a therapy, e.g., cancer therapy. For example, the period of responsiveness may involve the level of cancer cells falling below a certain threshold, e.g., below 20%, 15%, 10%, 5%, 4%, 3%, 2%, or 1%. The reappearance may involve the level of cancer cells rising above a certain threshold, e.g., above 20%, 15%, 10%, 5%, 4%, 3%, 2%, or 1%.

[0224] In one aspect, a “responder” of a therapy can be a subject having complete response, very good partial response, or partial response after receiving the therapy. In one aspect, a “non-responder” of a therapy can be a subject having minor response, stable disease, or progressive disease after receiving the therapy. In some embodiments, the subject has multiple myeloma and the response of the subject to a multiple myeloma therapy is determined based on IMWG 2016 criteria, e.g., as disclosed in Kumar, et al., Lancet Oncol. 17, e328-346 (2016), hereby incorporated herein by reference in its entirety, e.g., as described in Table 16.

[0225] Ranges: throughout this disclosure, various aspects of the invention can be presented in a range format. It should be understood that the description in range format is merely for convenience and brevity and should not be construed as an inflexible limitation on the scope of the invention. Accordingly, the description of a range should be considered to have specifically disclosed all the possible subranges as well as individual numerical values within that range. For example, description of a range such as from 1 to 6 should be considered to have specifically disclosed subranges such as from 1 to 3, from 1 to 4, from 1 to 5, from 2 to 4, from 2 to 6, from 3 to 6 etc., as well as individual numbers within that range, for example, 1, 2, 2.7, 3, 4, 5, 5.3, and 6. As another example, a range such as 95-99% identity, includes something with 95%, 96%, 97%, 98% or 99% identity, and includes subranges such as 96-99%, 96-98%, 96-97%, 97-99%, 97-98% and 98-99% identity. This applies regardless of the breadth of the range.

[0226] A “gene editing system” as the term is used herein, refers to a system, e.g., one or more molecules, that direct and effect an alteration, e.g., a deletion, of one or more nucleic acids at or near a site of genomic DNA targeted by said system. Gene editing systems are known in the art, and are described more fully below.

[0227] The term “cognate antigen molecule” refers to any antigen described herein. In some embodiments, it refers to an antigen bound, e.g., recognized or targeted, by a CAR polypeptide, e.g., any target CAR described herein. In some embodiments, it refers to a cancer associated antigen described herein. In some embodiments, the cognate antigen molecule is a recombinant molecule.

[0228] The term “IL-15 receptor molecule” as used herein refers to a full-length naturally-occurring IL-15 receptor alpha (IL-15Ra) (e.g., a mammalian IL-15Ra, e.g., human IL-15Ra, e.g., GenBank Accession Number AAI21141.1), an active fragment of IL-15Ra, or an active variant having at least 80%, 85%, 90%, 95%, 96%, 97%, 98%, or 99% sequence identity to a naturally-occurring wild type polypeptide of IL-15Ra or fragment thereof. In some embodiments, the variant is a derivative, e.g., a mutant, of a wild type polypeptide or nucleic acid encoding the same. In some embodiments, the IL-15Ra variant, e.g., active variant of IL-15Ra, has at least 50%, 60%, 70%, 80%, 85%, 90%, 95%, 96%, 97%, 98%, 99% or 100% activity of the wild type IL-15Ra polypeptide. In some embodiments, the IL-15Ra molecule comprises one or more post-translational modifications. As used herein, the terms IL-15R and IL-15Ra are interchangeable.

[0229] The term “IL-15 molecule” as used herein refers to a full-length naturally-occurring IL-15 (e.g., a mammalian IL-15, e.g., human IL-15, e.g., GenBank Accession Number AAI00963.1), an active fragment of IL-15, or an active variant having at least 80%, 85%, 90%, 95%, 96%, 97%, 98%, or 99% sequence identity to a naturally-occurring wild type polypeptide of IL-15 or fragment thereof. In some embodiments, the variant is a derivative, e.g., a mutant, of a wild type polypeptide or nucleic acid encoding the same. In some embodiments, the IL-15 variant, e.g., active variant of IL-15, has at least 50%, 60%, 70%, 80%, 85%, 90%, 95%, 96%, 97%, 98%, 99% or 100% activity of the wild type IL-15 polypeptide. In some embodiments, the IL-15 molecule comprises one or more post-translational modifications.

[0230] As used herein, an “active variant” of a cytokine molecule refers to a cytokine variant having at least 50%, 60%, 70%, 80%, 85%, 90%, 95%, 96%, 97%, 98%, 99% or 100% activity of wild type cytokine, e.g., as measured by an art-recognized assay.

[0231] Various aspects of the compositions and methods herein are described in further detail below. Additional definitions are set out throughout the specification.

### DETAILED DESCRIPTION

[0232] The present invention provides, at least in part, a method of treating a subject, e.g., a subject having a cancer, comprising administering to the subject an effective number of a cell (e.g., a population of cells) that expresses a CAR molecule, in combination with an IL-15R molecule and/or and IL-15 molecule.

### Chimeric Antigen Receptor (CAR)

[0233] In one aspect, disclosed herein are methods of using a cell (e.g., a population of cells) that expresses a CAR molecule, an IL-15R molecule and an IL-15 molecule (“CAR IL-15R/IL-15 expressing cell”). In one aspect, an exemplary CAR construct comprises an optional leader sequence (e.g., a leader sequence described herein), an antigen binding domain (e.g., an antigen binding domain described herein), a hinge (e.g., a hinge region described herein), a transmembrane domain (e.g., a transmembrane domain described herein), and an intracellular stimulatory domain (e.g., an intracellular stimulatory domain described herein). In one aspect, an exemplary CAR construct comprises an optional leader sequence (e.g., a leader sequence described herein), an extracellular antigen binding domain (e.g., an antigen binding domain described herein), a hinge (e.g., a hinge region described herein), a transmembrane domain (e.g., a transmembrane domain described herein), an intracellular costimulatory signaling domain (e.g., a costimulatory signaling domain described herein) and/or an intracellular primary signaling domain (e.g., a primary signaling domain described herein).

[0234] Sequences of non-limiting examples of various components that can be part of a CAR molecule described herein, are listed in Table 1 and Table 10, where “aa” stands for amino acids, and “na” stands for nucleic acids that encode the corresponding peptide.

TABLE 1
Sequences for various components of CAR

| | | |
|---|---|---|
| SEQ | pGK | AGCTTATGGTGCCCCAACCCCAACGCGGAAAAGGTTCCGTCGGGAC |
| ID | promoter | CCAAACGCGTCCCTGCGCCGACGAGACCCGCACCAAGGCCCTTTGC |
| NO: | | GTCGCCGCGGCTGGGACCCAGAGCGTGTAAGAAGTGCAGGCAAGC |
| 13 | | GTCGCAGTGGGCCTAGAAGCGGCGATGGGAACACCCGGGGGGCCG |
| | | CTGCGAAGGACGAGGCGGGGATTCAGCCCTTCCAAGGAACGCCAAG |
| | | CGCCGCACGGCCTGCACTATTTGCCTTCGGCGTGCAGAGTGATCATG |
| | | GGAGCGTCTGCCTGTCGCGGTCCCTCGTTACCGTCGCGCGGCTGGCG |
| | | CTACCCGACACCGGTTATCGCCGACGAGTCGTCCCGCGCGGCTCTCG |
| | | TCGCCGGCCCTTCCCCGCCACGCCCTCCGCCCCACACCCCGCCATCA |
| | | CACCCGGGACAAGGACGGGCGCGCCACAAGGCGTAAGACGTTCGG |
| | | AGGCCTCGCGTGCAGCCGTCAGCCGAGGGAGCAACTGGCTTAGTGG |
| | | CTGGAGAGAGGGGT |
| SEQ | CTL019 | GACATCCAGATGACACAGACTACATCCTCCCTGTCTGCCTCTCTGGG |
| ID | scFv | AGACAGAGTCACCATCAGTTGCAGGGCAAGTCAGGACATTAGTAAA |
| NO: | nucleotide | TATTTAAATTGGTATCAGCAGAAACCAGATGGAACTGTTAAACTCCT |
| 14 | sequence | GATCTACCATACATCAAGATTACACTCAGGAGTCCCATCAAGGTTC |
| | | AGTGGCAGTGGGTCTGGAACAGATTATTCTCTCACCATTAGCAACCT |
| | | GGAGCAAGAAGATATTGCCACTTACTTTTGCCAACAGGGTAATACG |
| | | CTTCCGTACACGTTCGGAGGGGGGACCAAGCTGGAGATCACAGGTG |
| | | GCGGTGGCTCGGGCGGTGGTGGGTCGGGTGGCGGCGGATCTGAGGT |
| | | GAAACTGCAGGAGTCAGGACCTGGCCTGGTGGCGCCCTCACAGAGC |
| | | CTGTCCGTCACATGCACTGTCTCAGGGGTCTCATTACCCGACTATGG |
| | | TGTAAGCTGGATTCGCCAGCCTCCACGAAAGGGTCTGGAGTGGCTG |
| | | GGAGTAATATGGGGTAGTGAAACCACATACTATAATTCAGCTCTCA |
| | | AATCCAGACTGACCATCATCAAGGACAACTCCAAGAGCCAAGTTTT |
| | | CTTAAAAATGAACAGTCTGCAAACTGATGACACAGCCATTTACTAC |
| | | TGTGCCAAACATTATTACTACGGTGGTAGCTATGCTATGGACTACTG |
| | | GGGCCAAGGAACCTCAGTCACCGTCTCCTCA |
| SEQ | CTL019 | DIQMTQTTSSLSASLGDRVTISCRASQDISKYLNWYQQKPDGTVKLLIY |
| ID | scFv amino | HTSRLHSGVPSRFSGSGSGTDYSLTISNLEQEDIATYFCQQGNTLPYTFG |
| NO: | acid | GGTKLEITGGGGSGGGGSGGGGSEVKLQESGPGLVAPSQSLSVTCTVS |
| 15 | sequence | GVSLPDYGVSWIRQPPRKGLEWLGVIWGSETTYYNSALKSRLTIIKDNS |
| | | KSQVFLKMNSLQTDDTAIYYCAKHYYYGGSYAMDYWGQGTSVTVSS |
| SEQ | P2A | GGAAGCGGAGCTACTAACTTCAGCCTGCTGAAGCAGGCTGGAGACG |
| ID | nucleotide | TGGAGGAGAACCCTGGACCT |
| NO: | sequence | |
| 23 | | |
| SEQ | P2A amino | GSGATNFSLLKQAGDVEENPGP |
| ID | acid | |
| NO: | sequence | |
| 24 | | |
| SEQ | CTL019 | GACATCCAGATGACACAGACTACATCCTCCCTGTCTGCCTCTCTGGG |
| ID | full-length | AGACAGAGTCACCATCAGTTGCAGGGCAAGTCAGGACATTAGTAAA |
| NO: | nucleotide | TATTTAAATTGGTATCAGCAGAAACCAGATGGAACTGTTAAACTCCT |
| 25 | sequence | GATCTACCATACATCAAGATTACACTCAGGAGTCCCATCAAGGTTC |
| | | AGTGGCAGTGGGTCTGGAACAGATTATTCTCTCACCATTAGCAACCT |
| | | GGAGCAAGAAGATATTGCCACTTACTTTTGCCAACAGGGTAATACG |
| | | CTTCCGTACACGTTCGGAGGGGGGACCAAGCTGGAGATCACAGGTG |
| | | GCGGTGGCTCGGGCGGTGGTGGGTCGGGTGGCGGCGGATCTGAGGT |
| | | GAAACTGCAGGAGTCAGGACCTGGCCTGGTGGCGCCCTCACAGAGC |
| | | CTGTCCGTCACATGCACTGTCTCAGGGGTCTCATTACCCGACTATGG |
| | | TGTAAGCTGGATTCGCCAGCCTCCACGAAAGGGTCTGGAGTGGCTG |
| | | GGAGTAATATGGGGTAGTGAAACCACATACTATAATTCAGCTCTCA |
| | | AATCCAGACTGACCATCATCAAGGACAACTCCAAGAGCCAAGTTTT |
| | | CTTAAAAATGAACAGTCTGCAAACTGATGACACAGCCATTTACTAC |
| | | TGTGCCAAACATTATTACTACGGTGGTAGCTATGCTATGGACTACTG |
| | | GGGCCAAGGAACCTCAGTCACCGTCTCCTCAACCACGACGCCAGCG |
| | | CCGCGACCACCAACACCGGCGCCCACCATCGCGTCGCAGCCCCTGT |
| | | CCCTGCGCCCAGAGGCGTGCCGGCCAGCGGCGGGGGGCGCAGTGCA |
| | | CACGAGGGGGCTGGACTTCGCCTGTGATATCTACATCTGGGCGCCCT |
| | | TGGCCGGGACTTGTGGGGTCCTTCTCCTGTCACTGGTTATCACCCTT |
| | | TACTGCAAACGGGGCAGAAAGAAACTCCTGTATATATTCAAACAAC |
| | | CATTTATGAGACCAGTACAAACTACTCAAGAGGAAGATGGCTGTAG |
| | | CTGCCGATTTCCAGAAGAAGAAGAAGGAGGATGTGAACTGAGAGT |
| | | GAAGTTCAGCAGGAGCGCAGACGCCCCCGCGTACAAGCAGGGCCA |
| | | GAACCAGCTCTATAACGAGCTCAATCTAGGACGAAGAGAGGAGTAC |
| | | GATGTTTTGGACAAGAGACGTGGCCGGGACCCTGAGATGGGGGGAA |
| | | AGCCGAGAAGGAAGAACCCTCAGGAAGGCCTGTACAATGAACTGC |
| | | AGAAAGATAAGATGGCGGAGGCCTACAGTGAGATTGGGATGAAAG |
| | | GCGAGCGCCGGAGGGGCAAGGGGCACGATGGCCTTTACCAGGGTCT |
| | | CAGTACAGCCACCAAGGACACCTACGACGCCCTTCACATGCAGGCC |
| | | CTGCCCCCTCGC |
| SEQ | CTL019 | DIQMTQTTSSLSASLGDRVTISCRASQDISKYLNWYQQKPDGTVKLLIY |
| ID | full-length | HTSRLHSGVPSRFSGSGSGTDYSLTISNLEQEDIATYFCQQGNTLPYTFG |
| NO: | amino acid | GGTKLEITGGGGSGGGGSGGGGSEVKLQESGPGLVAPSQSLSVTCTVS |
| 26 | sequence | GVSLPDYGVSWIRQPPRKGLEWLGVIWGSETTYYNSALKSRLTIIKDNS |
| | | KSQVFLKMNSLQTDDTAIYYCAKHYYYGGSYAMDYWGQGTSVTVSS |
| | | TTTPAPRPPTPAPTIASQPLSLRPEACRPAAGGAVHTRGLDFACDIYIWA |
| | | PLAGTCGVLLLSLVITLYCKRGRKKLLYIFKQPFMRPVQTTQEEDGCSC |
| | | RFPEEEEGGCELRVKFSRSADAPAYKQGQNQLYNELNLGRREEYDVLD |
| | | KRRGRDPEMGGKPRRKNPQEGLYNELQKDKMAEAYSEIGMKGERRR |
| | | GKGHDGLYQGLSTATKDTYDALHMQALPPR |

TABLE 10
Sequences of various components of CAR (aa-amino acid sequence, na-nucleic acid
sequence).

| SEQ ID | | |
|---|---|---|
| NO: | description | Sequence |
| SEQ ID | EF-1 | CGTGAGGCTCCGGTGCCCGTCAGTGGGCAGAGCGCACATCGCCC |
| NO: 1014 | promoter | ACAGTCCCCGAGAAGTTGGGGGGAGGGGTCGGCAATTGAACCG |
| | | GTGCCTAGAGAAGGTGGCGCGGGGTAAACTGGGAAAGTGATGT |
| | | CGTGTACTGGCTCCGCCTTTTTCCCGAGGGTGGGGGAGAACCGT |
| | | ATATAAGTGCAGTAGTCGCCGTGAACGTTCTTTTTCGCAACGGGT |
| | | TTGCCGCCAGAACACAGGTAAGTGCCGTGTGTGGTTCCCGCGGG |
| | | CCTGGCCTCTTTACGGGTTATGGCCCTTGCGTGCCTTGAATTACT |
| | | TCCACCTGGCTGCAGTACGTGATTCTTGATCCCGAGCTTCGGGTT |
| | | GGAAGTGGGTGGGAGAGTTCGAGGCCTTGCGCTTAAGGAGCCCC |
| | | TTCGCCTCGTGCTTGAGTTGAGGCCTGGCCTGGGCGCTGGGGCC |
| | | GCCGCGTGCGAATCTGGTGGCACCTTCGCGCCTGTCTCGCTGCTT |
| | | TCGATAAGTCTCTAGCCATTTAAAATTTTTGATGACCTGCTGCGA |
| | | CGCTTTTTTTCTGGCAAGATAGTCTTGTAAATGCGGGCCAAGATC |
| | | TGCACACTGGTATTTCGGTTTTTGGGGCCGCGGGCGGCGACGGG |
| | | GCCCGTGCGTCCCAGCGCACATGTTCGGCGAGGCGGGGCCTGCG |
| | | AGCGCGGCCACCGAGAATCGGACGGGGGTAGTCTCAAGCTGGCC |
| | | GGCCTGCTCTGGTGCCTGGCCTCGCGCCGCCGTGTATCGCCCCGC |
| | | CCTGGGCGGCAAGGCTGGCCCGGTCGGCACCAGTTGCGTGAGCG |
| | | GAAAGATGGCCGCTTCCCGGCCCTGCTGCAGGGAGCTCAAAATG |
| | | GAGGACGCGGCGCTCGGGAGAGCGGGCGGGTGAGTCACCCACA |
| | | CAAAGGAAAAGGGCCTTTCCGTCCTCAGCCGTCGCTTCATGTGA |
| | | CTCCACGGAGTACCGGGCGCCGTCCAGGCACCTCGATTAGTTCT |
| | | CGAGCTTTTGGAGTACGTCGTCTTTAGGTTGGGGGGAGGGGTTTT |
| | | ATGCGATGGAGTTTCCCCACACTGAGTGGGTGGAGACTGAAGTT |
| | | AGGCCAGCTTGGCACTTGATGTAATTCTCCTTGGAATTTGCCCTT |
| | | TTTGAGTTTGGATCTTGGTTCATTCTCAAGCCTCAGACAGTGGTT |
| | | CAAAGTTTTTTTCTTCCATTTCAGGTGTCGTGA |
| SEQ ID | Leader (aa) | MALPVTALLLPLALLLHAARP |
| NO: 1015 | | |
| SEQ ID | Leader (na) | ATGGCCCTGCCTGTGACAGCCCTGCTGCTGCCTCTGGCTCTGCTG |
| NO: 1016 | | CTGCATGCCGCTAGACCC |
| SEQ ID | Leader (na) | ATGGCCCTCCCTGTCACCGCCCTGCTGCTTCCGCTGGCTCTTCTG |
| NO: 1017 | | CTCCACGCCGCTCGGCCC |
| SEQ ID | CD8 hinge | TTTPAPRPPTPAPTIASQPLSLRPEACRPAAGGAVHTRGLDFACD |
| NO: 1018 | (aa) | |
| SEQ ID | CD8 hinge | ACCACGACGCCAGCGCCGCGACCACCAACACCGGCGCCCACCAT |
| NO: 1019 | (na) | CGCGTCGCAGCCCCTGTCCCTGCGCCCAGAGGCGTGCCGGCCAG |
| | | CGGCGGGGGGCGCAGTGCACACGAGGGGGCTGGACTTCGCCTGT |
| | | GAT |
| SEQ ID | Ig4 hinge | ESKYGPPCPPCPAPEFLGGPSVFLFPPKPKDTLMISRTPEVTCVVVDV |
| NO: 1020 | (aa) | SQEDPEVQFNWYVDGVEVHNAKTKPREEQFNSTYRVVSVLTVLHQ |
| | | DWLNGKEYKCKVSNKGLPSSIEKTISKAKGQPREPQVYTLPPSQEE |
| | | MTKNQVSLTCLVKGFYPSDIAVEWESNGQPENNYKTTPPVLDSDGS |
| | | FFLYSRLTVDKSRWQEGNVFSCSVMHEALHNHYTQKSLSLSLGKM |
| SEQ ID | Ig4 hinge | GAGAGCAAGTACGGCCCTCCCTGCCCCCCTTGCCCTGCCCCCGA |
| NO: 1021 | (na) | GTTCCTGGGCGGACCCAGCGTGTTCCTGTTCCCCCCCAAGCCCAA |
| | | GGACACCCTGATGATCAGCCGGACCCCCGAGGTGACCTGTGTGG |
| | | TGGTGGACGTGTCCCAGGAGGACCCCGAGGTCCAGTTCAACTGG |
| | | TACGTGGACGGCGTGGAGGTGCACAACGCCAAGACCAAGCCCC |
| | | GGGAGGAGCAGTTCAATAGCACCTACCGGGTGGTGTCCGTGCTG |
| | | ACCGTGCTGCACCAGGACTGGCTGAACGGCAAGGAATACAAGTG |
| | | TAAGGTGTCCAACAAGGGCCTGCCCAGCAGCATCGAGAAAACCA |
| | | TCAGCAAGGCCAAGGGCCAGCCTCGGGAGCCCCAGGTGTACACC |
| | | CTGCCCCCTAGCCAAGAGGAGATGACCAAGAACCAGGTGTCCCT |
| | | GACCTGCCTGGTGAAGGGCTTCTACCCCAGCGACATCGCCGTGG |
| | | AGTGGGAGAGCAACGGCCAGCCCGAGAACAACTACAAGACCAC |
| | | CCCCCCTGTGCTGGACAGCGACGGCAGCTTCTTCCTGTACAGCCG |
| | | GCTGACCGTGGACAAGAGCCGGTGGCAGGAGGGCAACGTCTTTA |
| | | GCTGCTCCGTGATGCACGAGGCCCTGCACAACCACTACACCCAG |
| | | AAGAGCCTGAGCCTGTCCCTGGGCAAGATG |
| SEQ ID | IgD hinge | RWPESPKAQASSVPTAQPQAEGSLAKATTAPATTRNTGRGGEEKK |
| NO: 1022 | (aa) | KEKEKEEQEERETKTPECPSHTQPLGVYLLTPAVQDLWLRDKATFT |
| | | CFVVGSDLKDAHLTWEVAGKVPTGGVEEGLLERHSNGSQSQHSRL |
| | | TLPRSLWNAGTSVTCTLNHPSLPPQRLMALREPAAQAPVKLSLNLL |
| | | ASSDPPEAASWLLCEVSGFSPPNILLMWLEDQREVNTSGFAPARPPP |
| | | QPGSTTFWAWSVLRVPAPPSPQPATYTCVVSHEDSRTLLNASRSLE |
| | | VSYVTDH |
| SEQ ID | IgD hinge | AGGTGGCCCGAAAGTCCCAAGGCCCAGGCATCTAGTGTTCCTAC |
| NO: 1023 | (na) | TGCACAGCCCCAGGCAGAAGGCAGCCTAGCCAAAGCTACTACTG |
| | | CACCTGCCACTACGCGCAATACTGGCCGTGGCGGGGAGGAGAAG |
| | | AAAAAGGAGAAAGAGAAAGAAGAACAGGAAGAGAGGGAGACC |
| | | AAGACCCCTGAATGTCCATCCCATACCCAGCCGCTGGGCGTCTA |
| | | TCTCTTGACTCCCGCAGTACAGGACTTGTGGCTTAGAGATAAGG |
| | | CCACCTTTACATGTTTCGTCGTGGGCTCTGACCTGAAGGATGCCC |
| | | ATTTGACTTGGGAGGTTGCCGGAAAGGTACCCACAGGGGGGGTT |
| | | GAGGAAGGGTTGCTGGAGCGCCATTCCAATGGCTCTCAGAGCCA |
| | | GCACTCAAGACTCACCCTTCCGAGATCCCTGTGGAACGCCGGGA |
| | | CCTCTGTCACATGTACTCTAAATCATCCTAGCCTGCCCCCACAGC |
| | | GTCTGATGGCCCTTAGAGAGCCAGCCGCCCAGGCACCAGTTAAG |
| | | CTTAGCCTGAATCTGCTCGCCAGTAGTGATCCCCCAGAGGCCGC |
| | | CAGCTGGCTCTTATGCGAAGTGTCCGGCTTTAGCCCGCCCAACAT |
| | | CTTGCTCATGTGGCTGGAGGACCAGCGAGAAGTGAACACCAGCG |
| | | GCTTCGCTCCAGCCCGGCCCCCACCCCAGCCGGGTTCTACCACAT |
| | | TCTGGGCCTGGAGTGTCTTAAGGGTCCCAGCACCACCTAGCCCC |
| | | CAGCCAGCCACATACACCTGTGTTGTGTCCCATGAAGATAGCAG |
| | | GACCCTGCTAAATGCTTCTAGGAGTCTGGAGGTTTCCTACGTGAC |
| | | TGACCATT |
| SEQ ID | GS | GGGGSGGGGS |
| NO: 1024 | hinge/linker | |
| | (aa) | |
| SEQ ID | GS | GGTGGCGGAGGTTCTGGAGGTGGAGGTTCC |
| NO: 1025 | hinge/linker | |
| | (na) | |
| SEQ ID | CD8 | IYIWAPLAGTCGVLLLSLVITLYC |
| NO: 1026 | transmembrane | |
| | (TM) (aa) | |
| SEQ ID | CD8 | ATCTACATCTGGGCGCCCTTGGCCGGGACTTGTGGGGTCCTTCTC |
| NO: 1027 | transmembrane | CTGTCACTGGTTATCACCCTTTACTGC |
| | (TM) (na) | |
| SEQ ID | CD8 TM (na) | ATCTACATTTGGGCCCCTCTGGCTGGTACTTGCGGGGTCCTGCTG |
| NO: 1028 | | CTTTCACTCGTGATCACTCTTTACTGT |
| SEQ ID | 4-1BB | KRGRKKLLYIFKQPFMRPVQTTQEEDGCSCRFPEEEEGGCEL |
| NO: 1029 | intracellular | |
| | domain (aa) | |
| SEQ ID | 4-1BB | AAACGGGGCAGAAAGAAACTCCTGTATATATTCAAACAACCATT |
| NO: 1030 | intracellular | TATGAGACCAGTACAAACTACTCAAGAGGAAGATGGCTGTAGCT |
| | domain (na) | GCCGATTTCCAGAAGAAGAAGAAGGAGGATGTGAACTG |
| SEQ ID | 4-1BB | AAGCGCGGTCGGAAGAAGCTGCTGTACATCTTTAAGCAACCCTT |
| NO: 1031 | intracellular | CATGAGGCCTGTGCAGACTACTCAAGAGGAGGACGGCTGTTCAT |
| | domain (na) | GCCGGTTCCCAGAGGAGGAGGAAGGCGGCTGCGAACTG |
| SEQ ID | CD27 (aa) | QRRKYRSNKGESPVEPAEPCRYSCPREEEGSTIPIQEDYRKPEPACSP |
| NO: 1032 | | |
| SEQ ID | CD27 (na) | AGGAGTAAGAGGAGCAGGCTCCTGCACAGTGACTACATGAACAT |
| NO: 1033 | | GACTCCCCGCCGCCCCGGGCCCACCCGCAAGCATTACCAGCCCT |
| | | ATGCCCCACCACGCGACTTCGCAGCCTATCGCTCC |
| SEQ ID | CD3-zeta | RVKFSRSADAPAYKQGQNQLYNELNLGRREEYDVLDKRRGRDPE |
| NO: 1034 | (aa) | MGGKPRRKNPQEGLYNELQKDKMAEAYSEIGMKGERRRGKGHDG |
| | | LYQGLSTATKDTYDALHMQALPPR |
| SEQ ID | CD3-zeta | AGAGTGAAGTTCAGCAGGAGCGCAGACGCCCCCGCGTACAAGC |
| NO: 1035 | (na) | AGGGCCAGAACCAGCTCTATAACGAGCTCAATCTAGGACGAAGA |
| | | GAGGAGTACGATGTTTTGGACAAGAGACGTGGCCGGGACCCTGA |
| | | GATGGGGGGAAAGCCGAGAAGGAAGAACCCTCAGGAAGGCCTG |
| | | TACAATGAACTGCAGAAAGATAAGATGGCGGAGGCCTACAGTG |
| | | AGATTGGGATGAAAGGCGAGCGCCGGAGGGGCAAGGGGCACGA |
| | | TGGCCTTTACCAGGGTCTCAGTACAGCCACCAAGGACACCTACG |
| | | ACGCCCTTCACATGCAGGCCCTGCCCCCTCGC |
| SEQ ID | CD3-zeta | CGCGTGAAATTCAGCCGCAGCGCAGATGCTCCAGCCTACAAGCA |
| NO: 1036 | (na) | GGGGCAGAACCAGCTCTACAACGAACTCAATCTTGGTCGGAGAG |
| | | AGGAGTACGACGTGCTGGACAAGCGGAGAGGACGGGACCCAGA |
| | | AATGGGCGGGAAGCCGCGCAGAAAGAATCCCCAAGAGGGCCTG |
| | | TACAACGAGCTCCAAAAGGATAAGATGGCAGAAGCCTATAGCG |
| | | AGATTGGTATGAAAGGGGAACGCAGAAGAGGCAAAGGCCACGA |
| | | CGGACTGTACCAGGGACTCAGCACCGCCACCAAGGACACCTATG |
| | | ACGCTCTTCACATGCAGGCCCTGCCGCCTCGG |
| SEQ ID | CD3-zeta | RVKFSRSADAPAYQQGQNQLYNELNLGRREEYDVLDKRRGRDPE |
| NO: 1037 | (aa) | MGGKPRRKNPQEGLYNELQKDKMAEAYSEIGMKGERRRGKGHDG |
| | | LYQGLSTATKDTYDALHMQALPPR |
| SEQ ID | CD3-zeta | AGAGTGAAGTTCAGCAGGAGCGCAGACGCCCCCGCGTACCAGC |
| NO: 1038 | (na) | AGGGCCAGAACCAGCTCTATAACGAGCTCAATCTAGGACGAAGA |
| | | GAGGAGTACGATGTTTTGGACAAGAGACGTGGCCGGGACCCTGA |
| | | GATGGGGGGAAAGCCGAGAAGGAAGAACCCTCAGGAAGGCCTG |
| | | TACAATGAACTGCAGAAAGATAAGATGGCGGAGGCCTACAGTG |
| | | AGATTGGGATGAAAGGCGAGCGCCGGAGGGGCAAGGGGCACGA |
| | | TGGCCTTTACCAGGGTCTCAGTACAGCCACCAAGGACACCTACG |
| | | ACGCCCTTCACATGCAGGCCCTGCCCCCTCGC |
| SEQ ID | linker | GGGGS |
| NO: 1039 | | |
| SEQ ID | linker | GGTGGCGGAGGTTCTGGAGGTGGAGGTTCC |
| NO: 1040 | | |
| SEQ ID | PD-1 | Pgwfldspdrpwnpptfspallvvtegdnatftcsfsntsesfvlnwyrmspsnqtdklaafpedrsqp |
| NO: 1041 | extracellular | gqdcrfrvtqlpngrdfhmsvvrarrndsgtylcgaislapkaqikeslraelrvterraevptahpspspr |
| | domain (aa) | pagqfqtlv |
| SEQ ID | PD-1 | Cccggatggtttctggactctccggatcgcccgtggaatcccccaaccttctcaccggcactcttggttgtga |
| NO: 1042 | extracellular | ctgagggcgataatgcgaccttcacgtgctcgttctccaacacctccgaatcattcgtgctgaactggtaccg |
| | domain (na) | catgagcccgtcaaaccagaccgacaagctcgccgcgtttccggaagatcggtcgcaaccgggacagga |
| | | ttgtcggttccgcgtgactcaactgccgaatggcagagacttccacatgagcgtggtccgcgctaggcgaa |
| | | acgactccgggacctacctgtgcggagccatctcgctggcgcctaaggcccaaatcaaagagagcttgag |
| | | ggccgaactgagagtgaccgagcgcagagctgaggtgccaactgcacatccatccccatcgcctcggcc |
| | | tgcggggcagtttcagaccctggtc |
| SEQ ID | PD-1 CAR | Malpvtalllplalllhaarppgwfldspdrpwnpptfspallvvtegdnatftcsfsntsesvlnwyrm |
| NO: 1043 | (aa) with | spsnqtdklaafpedrsqpgqdcrfrvtqlpngrdfhmsvvrarrndsgtylcgaislapkaqikeslrae |
| | signal | lrvterraevptahpspsprpagqfqtlvtttpaprpptpaptiasqplslrpeacrpaaggavhtrgldfac |
| | | diyiwaplagtcgvlllslvitlyckrgrkkllyifkqpfmrpvqttqeedgcscrfpeeeeggcelrvkfsr |
| | | sadapaykqgqnqlynelnlgrreeydvldkagrdpemggkprrknpqeglynelqkdkmaeays |
| | | eigmkgerrrgkghdglyqglstatkdtydalhmqalppr |
| SEQ ID | PD-1 CAR | Atggccctccctgtcactgccctgcttctccccctcgcactcctgctccacgccgctagaccacccggatg |
| NO: 1044 | (na) | gtttctggactctccggatcgcccgtggaatcccccaaccttctcaccggcactcttggttgtgactgagggc |
| | | gataatgcgaccttcacgtgctcgttctccaacacctccgaatcattcgtgctgaactggtaccgcatgagcc |
| | | cgtcaaaccagaccgacaagctcgccgcgtttccggaagatcggtcgcaaccgggacaggattgtcggtt |
| | | ccgcgtgactcaactgccgaatggcagagacttccacatgagcgtggtccgcgctaggcgaaacgactcc |
| | | gggacctacctgtgcggagccatctcgctggcgcctaaggcccaaatcaaagagagcttgagggccgaa |
| | | ctgagagtgaccgagcgcagagctgaggtgccaactgcacatccatccccatcgcctcggcctgcgggg |
| | | cagtttcagaccctggtcacgaccactccggcgccgcgcccaccgactccggccccaactatcgcgagcc |
| | | agcccctgtcgctgaggccggaagcatgccgccctgccgccggaggtgctgtgcatacccggggattgg |
| | | acttcgcatgcgacatctacatttgggctcctctcgccggaacttgtggcgtgctccttctgtccctggtcatca |
| | | ccctgtactgcaagcggggtcggaaaaagcttctgtacattttcaagcagcccttcatgaggcccgtgcaaa |
| | | ccacccaggaggaggacggttgctcctgccggttccccgaagaggaagaaggaggttgcgagctgcgc |
| | | gtgaagttctcccggagcgccgacgcccccgcctataagcagggccagaaccagctgtacaacgaactg |
| | | aacctgggacggcgggaagagtacgatgtgctggacaagcggcgcggccgggaccccgaaatgggcg |
| | | ggaagcctagaagaaagaaccctcaggaaggcctgtataacgagctgcagaaggacaagatggccgag |
| | | gcctactccgaaattgggatgaagggagagcggcggaggggaaaggggcacgacggcctgtaccaag |
| | | gactgtccaccgccaccaaggacacatacgatgccctgcacatgcaggcccttccccctcgc |
| SEQ ID | linker | (Gly-Gly-Gly-Ser)n, where n = 1-10 |
| NO: 1009 | | |
| SEQ ID | linker | (Gly4 Ser)4 |
| NO: 1010 | | |
| SEQ ID | linker | (Gly4 Ser)3 |
| NO: 1011 | | |
| SEQ ID | linker | (Gly3Ser) |
| NO: 1012 | | |
| SEQ ID | linker | ASGGGGSGGRASGGGGS |
| NO: 1045 | | |
| SEQ ID | polyA | [a]₅₀₋₅₀₀₀ |
| NO: 1013 | | |
| SEQ ID | PD1 CAR | Pgwfldspdrpwnpptfspallvvtegdnatftcsfsntsesfvlnwyrmspsnqtdklaafpedrsqp |
| NO: 1046 | (aa) | gqdcrfrvtqlpngrdfhmsvvrarrndsgtylcgaislapkaqikeslraelrvterraevptahpspspr |
| | | pagqfqtlvtttpaprpptpaptiasqplslrpeacrpaaggavhtrgldfacdiyiwaplagtcgvlllslvi |
| | | tlyckrgrkkllyiflcqpfmrpvqttqeedgcscrfpeeeeggcelrvkfsrsadapaykqgqnqlynel |
| | | nlgrreeydvldlargrdpemggkprrknpqeglynelqkdkmaeayseigmkgeragkghdgly |
| | | qglstatkdtydalhmqalppr |
| SEQ ID | ICOS | TKKKYSSSVHDPNGEYMFMRAVNTAKKSRLTDVTL |
| NO: 1047 | intracellular | |
| | domain (aa) | |
| SEQ ID | ICOS | ACAAAAAAGAAGTATTCATCCAGTGTGCACGACCCTAACGGTGA |
| NO: 1048 | intracellular | ATACATGTTCATGAGAGCAGTGAACACAGCCAAAAAATCCAGAC |
| | domain (na) | TCACAGATGTGACCCTA |
| SEQ ID | ICOS TM | TTTPAPRPPTPAPTIASQPLSLRPEACRPAAGGAVHTRGLDFACDFW |
| NO: 1049 | domain (aa) | LPIGCAAFVVVCILGCILICWL |
| SEQ ID | ICOS TM | ACCACGACGCCAGCGCCGCGACCACCAACACCGGCGCCCACCAT |
| NO: 1050 | domain (na) | CGCGTCGCAGCCCCTGTCCCTGCGCCCAGAGGCGTGCCGGCCAG |
| | | CGGCGGGGGGCGCAGTGCACACGAGGGGGCTGGACTTCGCCTGT |
| | | GATTTCTGGTTACCCATAGGATGTGCAGCCTTTGTTGTAGTCTGC |
| | | ATTTTGGGATGCATACTTATTTGTTGGCTT |
| SEQ ID | CD28 | RSKRSRLLHSDYMNMTPRRPGPTRKHYQPYAPPRDFAAYRS |
| NO: 1051 | intracellular | |
| | domain (aa) | |
| SEQ ID | CD28 | AGGAGTAAGAGGAGCAGGCTCCTGCACAGTGACTACATGAACAT |
| NO: 1052 | intracellular | GACTCCCCGCCGCCCCGGGCCCACCCGCAAGCATTACCAGCCCT |
| | domain (na) | ATGCCCCACCACGCGACTTCGCAGCCTATCGCTCC |

### CAR Antigen Binding Domain

[0235] In one aspect, the portion of the CAR comprising the antigen binding domain comprises an antigen binding domain that targets a tumor antigen, e.g., a tumor antigen described herein. In some embodiments, the antigen binding domain binds to: CD19; CD123; CD22; CD30; CD171; CS-1; C-type lectin-like molecule-1, CD33; epidermal growth factor receptor variant III (EGFRvIII); ganglioside G2 (GD2); ganglioside GD3; TNF receptor family member; B-cell maturation antigen (BCMA); Tn antigen ((Tn Ag) or (GalNAcα-Ser/Thr)); prostate-specific membrane antigen (PSMA); Receptor tyrosine kinase-like orphan receptor 1 (ROR1); Fms-Like Tyrosine Kinase 3 (FLT3); Tumor-associated glycoprotein 72 (TAG72); CD38; CD44v6; Carcinoembryonic antigen (CEA); Epithelial cell adhesion molecule (EPCAM); B7H3 (CD276); KIT (CD117); Interleukin-13 receptor subunit alpha-2; Mesothelin; Interleukin 11 receptor alpha (IL-11Ra); prostate stem cell antigen (PSCA); Protease Serine 21; vascular endothelial growth factor receptor 2 (VEGFR2); Lewis (Y) antigen; CD24; Platelet-derived growth factor receptor beta (PDGFR-beta); Stage-specific embryonic antigen-4 (SSEA-4); CD20; Folate receptor alpha; Receptor tyrosine-protein kinase ERBB2 (Her2/neu); Mucin 1, cell surface associated (MUC1); epidermal growth factor receptor (EGFR); neural cell adhesion molecule (NCAM); Prostase; prostatic acid phosphatase (PAP); elongation factor 2 mutated (ELF2M); Ephrin B2; fibroblast activation protein alpha (FAP); insulin-like growth factor 1 receptor (IGF-I receptor), carbonic anhydrase IX (CAIX); Proteasome (Prosome, Macropain) Subunit, Beta Type, 9 (LMP2); glycoprotein 100 (gp100); oncogene fusion protein consisting of breakpoint cluster region (BCR) and Abelson murine leukemia viral oncogene homolog 1 (Abl) (bcr-abl); tyrosinase; ephrin type-A receptor 2 (EphA2); Fucosyl GM1; sialyl Lewis adhesion molecule (sLe); ganglioside GM3; transglutaminase 5 (TGS5); high molecular weight-melanoma-associated antigen (HMWMAA); o-acetyl-GD2 ganglioside (OAcGD2); Folate receptor beta; tumor endothelial marker 1 (TEM1/CD248); tumor endothelial marker 7-related (TEM7R); claudin 6 (CLDN6); thyroid stimulating hormone receptor (TSHR); G protein-coupled receptor class C group 5, member D (GPRC5D); chromosome X open reading frame 61 (CXORF61); CD97; CD179a; anaplastic lymphoma kinase (ALK); Polysialic acid; placenta-specific 1 (PLAC1); hexasaccharide portion of globoH glycoceramide (GloboH); mammary gland differentiation antigen (NY-BR-1); uroplakin 2 (UPK2); Hepatitis A virus cellular receptor 1 (HAVCR1); adrenoceptor beta 3 (ADRB3); pannexin 3 (PANX3); G protein-coupled receptor 20 (GPR20); lymphocyte antigen 6 complex, locus K 9 (LY6K); Olfactory receptor 51E2 (OR51E2); TCR Gamma Alternate Reading Frame Protein (TARP); Wilms tumor protein (WT1); Cancer/testis antigen 1 (NY-ESO-1); Cancer/testis antigen 2 (LAGE-1a); Melanoma-associated antigen 1 (MAGE-A1); ETS translocation-variant gene 6, located on chromosome 12p (ETV6-AML); sperm protein 17 (SPA17); X Antigen Family, Member 1A (XAGE1); angiopoietin-binding cell surface receptor 2 (Tie 2); melanoma cancer testis antigen-1 (MAD-CT-1); melanoma cancer testis antigen-2 (MAD-CT-2); Fos-related antigen 1; tumor protein p53 (p53); p53 mutant; prostein; surviving; telomerase; prostate carcinoma tumor antigen-1, melanoma antigen recognized by T cells 1; Rat sarcoma (Ras) mutant; human Telomerase reverse transcriptase (hTERT); sarcoma translocation breakpoints; melanoma inhibitor of apoptosis (ML-IAP); ERG (transmembrane protease, serine 2 (TMPRSS2) ETS fusion gene); N-Acetyl glucosaminyl-transferase V (NA17); paired box protein Pax-3 (PAX3); Androgen receptor; Cyclin B1; v-myc avian myelocytomatosis viral oncogene neuroblastoma derived homolog (MYCN); Ras Homolog Family Member C (RhoC); Tyrosinase-related protein 2 (TRP-2); Cytochrome P450 1B1 (CYP1B1); CCCTC-Binding Factor (Zinc Finger Protein)-Like, Squamous Cell Carcinoma Antigen Recognized By T Cells 3 (SART3); Paired box protein Pax-5 (PAX5); proacrosin binding protein sp32 (OY-TES1); lymphocyte-specific protein tyrosine kinase (LCK); A kinase anchor protein 4 (AKAP-4); synovial sarcoma, X breakpoint 2 (SSX2); Receptor for Advanced Glycation Endproducts (RAGE-1); renal ubiquitous 1 (RU1); renal ubiquitous 2 (RU2); legumain; human papilloma virus E6 (HPV E6); human papilloma virus E7 (HPV E7); intestinal carboxyl esterase; heat shock protein 70-2 mutated (mut hsp70-2); CD79a; CD79b; CD72; Leukocyte-associated immunoglobulin-like receptor 1 (LAIR1); Fc fragment of IgA receptor (FCAR or CD89); Leukocyte immunoglobulin-like receptor subfamily A member 2 (LILRA2); CD300 molecule-like family member f (CD300LF); C-type lectin domain family 12 member A (CLEC12A); bone marrow stromal cell antigen 2 (BST2); EGF-like module-containing mucin-like hormone receptor-like 2 (EMR2); lymphocyte antigen 75 (LY75); Glypican-3 (GPC3); Fc receptor-like 5 (FCRL5); or immunoglobulin lambda-like polypeptide 1 (IGLL1).

[0236] The antigen binding domain can be any domain that binds to an antigen, including but not limited to a monoclonal antibody, a polyclonal antibody, a recombinant antibody, a human antibody, a humanized antibody, and a functional fragment thereof, including but not limited to a single-domain antibody such as a heavy chain variable domain (VH), a light chain variable domain (VL) and a variable domain (VHH) of camelid derived nanobody, and to an alternative scaffold known in the art to function as antigen binding domain, such as a recombinant fibronectin domain, a T cell receptor (TCR), or a fragment there of, e.g., single chain TCR, and the like. In some instances, it is beneficial for the antigen binding domain to be derived from the same species in which the CAR will ultimately be used in. For example, for use in humans, it may be beneficial for the antigen binding domain of the CAR to comprise human or humanized residues for the antigen binding domain of an antibody or antibody fragment.

### CAR Transmembrane Domain

[0237] With respect to the transmembrane domain, in various embodiments, a CAR can be designed to comprise a transmembrane domain that is attached to the extracellular domain of the CAR. A transmembrane domain can include one or more additional amino acids adjacent to the transmembrane region, e.g., one or more amino acid associated with the extracellular region of the protein from which the transmembrane was derived (e.g., 1, 2, 3, 4, 5, 6, 7, 8, 9, 10 up to 15 amino acids of the extracellular region) and/or one or more additional amino acids associated with the intracellular region of the protein from which the transmembrane protein is derived (e.g., 1, 2, 3, 4, 5, 6, 7, 8, 9, 10 up to 15 amino acids of the intracellular region). In one aspect, the transmembrane domain is one that is associated with one of the other domains of the CAR. In some instances, the transmembrane domain can be selected or modified by amino acid substitution to avoid binding of such domains to the transmembrane domains of the same or different surface membrane proteins, e.g., to minimize interactions with other members of the receptor complex. In one aspect, the transmembrane domain is capable of homodimerization with another CAR on the cell surface of a CAR-expressing cell. In a different aspect, the amino acid sequence of the transmembrane domain may be modified or substituted so as to minimize interactions with the binding domains of the native binding partner present in the same CART.

[0238] The transmembrane domain may be derived either from a natural or from a recombinant source. Where the source is natural, the domain may be derived from any membrane-bound or transmembrane protein. In one aspect the transmembrane domain is capable of signaling to the intracellular domain(s) whenever the CAR has bound to a target. A transmembrane domain of particular use in this invention may include at least the transmembrane region(s) of e.g., the alpha, beta or zeta chain of the T-cell receptor, CD28, CD27, CD3 epsilon, CD45, CD4, CD5, CD8, CD9, CD16, CD22, CD33, CD37, CD64, CD80, CD86, CD134, CD137, CD154. In some embodiments, a transmembrane domain may include at least the transmembrane region(s) of, e.g., KIR2DS2, OX40, CD2, CD27, LFA-1 (CD11a, CD18), ICOS (CD278), 4-1BB (CD137), GITR, CD40, BAFFR, HVEM (LIGHTR), SLAMF7, NKp80 (KLRF1), NKp44, NKp30, NKp46, CD160, CD19, IL2R beta, IL2R gamma, IL7R α, ITGA1, VLA1, CD49a, ITGA4, IA4, CD49D, ITGA6, VLA-6, CD49f, ITGAD, CD11d, ITGAE, CD103, ITGAL, CD11a, LFA-1, ITGAM, CD11b, ITGAX, CD11c, ITGB1, CD29, ITGB2, CD18, LFA-1, ITGB7, TNFR2, DNAM1 (CD226), SLAMF4 (CD244, 2B4), CD84, CD96 (Tactile), CEACAM1, CRTAM, Ly9 (CD229), CD160 (BY55), PSGL1, CD100 (SEMA4D), SLAMF6 (NTB-A, Ly108), SLAM (SLAMF1, CD150, IPO-3), BLAME (SLAMF8), SELPLG (CD162), LTBR, PAG/Cbp, NKG2D, NKG2C.

[0239] In some instances, the transmembrane domain can be attached to the extracellular region of the CAR, e.g., the antigen binding domain of the CAR, via a hinge, e.g., a hinge from a human protein. For example, in one embodiment, the hinge can be a human Ig (immunoglobulin) hinge, e.g., an IgG4 hinge, or a CD8a hinge. In one embodiment, the hinge or spacer comprises (e.g., consists of) the amino acid sequence of SEQ ID NO: 1018. In one aspect, the transmembrane domain comprises (e.g., consists of) a transmembrane domain of SEQ ID NO: 1026.

[0240] In one aspect, the hinge or spacer comprises an IgG4 hinge. For example, in one embodiment, the hinge or spacer comprises a hinge of the amino acid sequence of SEQ ID NO: 1020. In some embodiments, the hinge or spacer comprises a hinge encoded by a nucleotide sequence of SEQ ID NO: 1021.

[0241] In one aspect, the hinge or spacer comprises an IgD hinge. For example, in one embodiment, the hinge or spacer comprises a hinge of the amino acid sequence of SEQ ID NO: 1022. In some embodiments, the hinge or spacer comprises a hinge encoded by a nucleotide sequence of SEQ ID NO: 1023.

[0242] In one aspect, the transmembrane domain may be recombinant, in which case it will comprise predominantly hydrophobic residues such as leucine and valine. In one aspect a triplet of phenylalanine, tryptophan and valine can be found at each end of a recombinant transmembrane domain.

[0243] Optionally, a short oligo- or polypeptide linker, between 2 and 10 amino acids in length may form the linkage between the transmembrane domain and the cytoplasmic region of the CAR. A glycine-serine doublet provides a particularly suitable linker. For example, in one aspect, the linker comprises the amino acid sequence of SEQ ID NO: 1024. In some embodiments, the linker is encoded by a nucleotide sequence of SEQ ID NO: 1025.

[0244] In one aspect, the hinge or spacer comprises a KIR2DS2 hinge.

### Cytoplasmic Domain

[0245] The cytoplasmic domain or region of the CAR includes an intracellular signaling domain. An intracellular signaling domain is generally responsible for activation of at least one of the normal effector functions of the immune cell in which the CAR has been introduced.

[0246] Examples of intracellular signaling domains for use in a CAR described herein include the cytoplasmic sequences of the T cell receptor (TCR) and co-receptors that act in concert to initiate signal transduction following antigen receptor engagement, as well as any derivative or variant of these sequences and any recombinant sequence that has the same functional capability.

[0247] It is known that signals generated through the TCR alone are insufficient for full activation of the T cell and that a secondary and/or costimulatory signal is also required. Thus, T cell activation can be said to be mediated by two distinct classes of cytoplasmic signaling sequences: those that initiate antigen-dependent primary activation through the TCR (primary intracellular signaling domains) and those that act in an antigen-independent manner to provide a secondary or costimulatory signal (secondary cytoplasmic domain, e.g., a costimulatory domain).

[0248] A primary signaling domain regulates primary activation of the TCR complex either in a stimulatory way, or in an inhibitory way. Primary intracellular signaling domains that act in a stimulatory manner may contain signaling motifs which are known as immunoreceptor tyrosine-based activation motifs or ITAMs.

[0249] Examples of ITAM containing primary intracellular signaling domains that are of particular use in the invention include those of TCR zeta, FcR gamma, FcR beta, CD3 gamma, CD3 delta, CD3 epsilon, CD5, CD22, CD79a, CD79b, CD278 (also known as “ICOS”), FcεRI, DAP10, DAP12, and CD66d. In one embodiment, a CAR of the invention comprises an intracellular signaling domain, e.g., a primary signaling domain of CD3-zeta, e.g., a CD3-zeta sequence described herein.

[0250] In one embodiment, a primary signaling domain comprises a modified ITAM domain, e.g., a mutated ITAM domain which has altered (e.g., increased or decreased) activity as compared to the native ITAM domain. In one embodiment, a primary signaling domain comprises a modified ITAM-containing primary intracellular signaling domain, e.g., an optimized and/or truncated ITAM-containing primary intracellular signaling domain. In an embodiment, a primary signaling domain comprises one, two, three, four or more ITAM motifs.

### Costimulatory Signaling Domain

[0251] The intracellular signalling domain of the CAR can comprise the CD3-zeta signaling domain by itself or it can be combined with any other desired intracellular signaling domain(s) useful in the context of a CAR of the invention. For example, the intracellular signaling domain of the CAR can comprise a CD3 zeta chain portion and a costimulatory signaling domain. The costimulatory signaling domain refers to a portion of the CAR comprising the intracellular domain of a costimulatory molecule. In one embodiment, the intracellular domain is designed to comprise the signaling domain of CD3-zeta and the signaling domain of CD28. In one aspect, the intracellular domain is designed to comprise the signaling domain of CD3-zeta and the signaling domain of ICOS.

[0252] A costimulatory molecule can be a cell surface molecule other than an antigen receptor or its ligands that is required for an efficient response of lymphocytes to an antigen. Examples of such molecules include CD27, CD28, 4-1BB (CD137), OX40, CD30, CD40, PD-1, ICOS, lymphocyte function-associated antigen-1 (LFA-1), CD2, CD7, LIGHT, NKG2C, B7-H3, and a ligand that specifically binds with CD83, and the like. For example, CD27 costimulation has been demonstrated to enhance expansion, effector function, and survival of human CART cells in vitro and augments human T cell persistence and antitumor activity in vivo (Song et al. Blood. 2012; 119(3):696-706). Further examples of such costimulatory molecules include CD5, ICAM-1, GITR, BAFFR, HVEM (LIGHTR), SLAMF7, NKp80 (KLRF1), NKp30, NKp44, NKp46, CD160, CD19, CD4, CD8alpha, CD8beta, IL2R beta, IL2R gamma, IL7R alpha, ITGA4, VLA1, CD49a, ITGA4, IA4, CD49D, ITGA6, VLA-6, CD49f, ITGAD, CD11d, ITGAE, CD103, ITGAL, CD11a, LFA-1, ITGAM, CD11b, ITGAX, CD11c, ITGB1, CD29, ITGB2, CD18, LFA-1, ITGB7, TNFR2, TRANCE/RANKL, DNAM1 (CD226), SLAMF4 (CD244, 2B4), CD84, CD96 (Tactile), CEACAM1, CRTAM, Ly9 (CD229), CD160 (BY55), PSGL1, CD100 (SEMA4D), CD69, SLAMF6 (NTB-A, Ly108), SLAM (SLAMF1, CD150, IPO-3), BLAME (SLAMF8), SELPLG (CD162), LTBR, LAT, GADS, SLP-76, NKG2D, NKG2C and PAG/Cbp.

[0253] The intracellular signaling sequences within the cytoplasmic portion of the CAR may be linked to each other in a random or specified order. Optionally, a short oligo- or polypeptide linker, for example, between 2 and 10 amino acids (e.g., 2, 3, 4, 5, 6, 7, 8, 9, or 10 amino acids) in length may form the linkage between intracellular signaling sequence. In one embodiment, a glycine-serine doublet can be used as a suitable linker. In one embodiment, a single amino acid, e.g., an alanine, a glycine, can be used as a suitable linker.

[0254] In one aspect, the intracellular signaling domain is designed to comprise two or more, e.g., 2, 3, 4, 5, or more, costimulatory signaling domains. In an embodiment, the two or more, e.g., 2, 3, 4, 5, or more, costimulatory signaling domains, are separated by a linker molecule, e.g., a linker molecule described herein. In one embodiment, the intracellular signaling domain comprises two costimulatory signaling domains. In some embodiments, the linker molecule is a glycine residue. In some embodiments, the linker is an alanine residue.

[0255] In one aspect, the intracellular signaling domain is designed to comprise the signaling domain of CD3-zeta and the signaling domain of CD28. In one aspect, the intracellular signaling domain is designed to comprise the signaling domain of CD3-zeta and the signaling domain of 4-1BB. In one aspect, the signaling domain of 4-1BB is a signaling domain of SEQ ID NO: 1029. In one aspect, the signaling domain of CD3-zeta is a signaling domain of SEQ ID NO: 1034.

[0256] In one aspect, the intracellular signaling domain is designed to comprise the signaling domain of CD3-zeta and the signaling domain of CD27. In one aspect, the signaling domain of CD27 comprises an amino acid sequence of SEQ ID NO: 1032. In one aspect, the signalling domain of CD27 is encoded by a nucleic acid sequence of SEQ ID NO: 1033.

[0257] In one aspect, the CAR-expressing cell described herein can further comprise a second CAR, e.g., a second CAR that includes a different antigen binding domain, e.g., to the same target or a different target (e.g., a target other than a cancer associated antigen described herein or a different cancer associated antigen described herein, e.g., CD19, CD33, CLL-1, CD34, FLT3, or folate receptor beta). In one embodiment, the second CAR includes an antigen binding domain to a target expressed the same cancer cell type as the cancer associated antigen. In one embodiment, the CAR-expressing cell comprises a first CAR that targets a first antigen and includes an intracellular signaling domain having a costimulatory signaling domain but not a primary signaling domain, and a second CAR that targets a second, different, antigen and includes an intracellular signaling domain having a primary signaling domain but not a costimulatory signaling domain. While not wishing to be bound by theory, placement of a costimulatory signaling domain, e.g., 4-1BB, CD28, ICOS, CD27 or OX-40, onto the first CAR, and the primary signaling domain, e.g., CD3 zeta, on the second CAR can limit the CAR activity to cells where both targets are expressed. In one embodiment, the CAR expressing cell comprises a first cancer associated antigen CAR that includes an antigen binding domain that binds a target antigen described herein, a transmembrane domain and a costimulatory domain and a second CAR that targets a different target antigen (e.g., an antigen expressed on that same cancer cell type as the first target antigen) and includes an antigen binding domain, a transmembrane domain and a primary signaling domain. In another embodiment, the CAR expressing cell comprises a first CAR that includes an antigen binding domain that binds a target antigen described herein, a transmembrane domain and a primary signaling domain and a second CAR that targets an antigen other than the first target antigen (e.g., an antigen expressed on the same cancer cell type as the first target antigen) and includes an antigen binding domain to the antigen, a transmembrane domain and a costimulatory signaling domain.

[0258] In another aspect, the disclosure features a population of CAR-expressing cells, e.g., CART cells. In some embodiments, the population of CAR-expressing cells comprises a mixture of cells expressing different CARs. For example, in one embodiment, the population of CART cells can include a first cell expressing a CAR having an antigen binding domain to a cancer associated antigen described herein, and a second cell expressing a CAR having a different antigen binding domain, e.g., an antigen binding domain to a different a cancer associated antigen described herein, e.g., an antigen binding domain to a cancer associated antigen described herein that differs from the cancer associate antigen bound by the antigen binding domain of the CAR expressed by the first cell. As another example, the population of CAR-expressing cells can include a first cell expressing a CAR that includes an antigen binding domain to a cancer associated antigen described herein, and a second cell expressing a CAR that includes an antigen binding domain to a target other than a cancer associate antigen as described herein. In one embodiment, the population of CAR-expressing cells includes, e.g., a first cell expressing a CAR that includes a primary intracellular signaling domain, and a second cell expressing a CAR that includes a secondary signaling domain.

[0259] In another aspect, the disclosure features a population of cells wherein at least one cell in the population expresses a CAR having an antigen binding domain to a cancer associated antigen described herein, and a second cell expressing another agent, e.g., an agent which enhances the activity of a CAR-expressing cell. For example, in one embodiment, the agent can be an agent which inhibits an inhibitory molecule. Inhibitory molecules, e.g., PD-1, can, in some embodiments, decrease the ability of a CAR-expressing cell to mount an immune effector response. Examples of inhibitory molecules include PD-1, PD-L1, CTLA4, TIM3, CEACAM (CEACAM-1, CEACAM-3, and/or CEACAM-5), LAG3, VISTA, BTLA, TIGIT, LAIR1, CD160, 2B4, CD80, CD86, B7-H3 (CD276), B7-H4 (VTCN1), HVEM (TNFRSF14 or CD270), KIR, A2aR, MHC class I, MHC class II, GAL9, adenosine, and TGF (e.g., TGFbeta). In one embodiment, the agent which inhibits an inhibitory molecule comprises a first polypeptide, e.g., an inhibitory molecule, associated with a second polypeptide that provides a positive signal to the cell, e.g., an intracellular signaling domain described herein. In one embodiment, the agent comprises a first polypeptide, e.g., of an inhibitory molecule such as PD-1, PD-L1, CTLA4, TIM3, CEACAM (CEACAM-1, CEACAM-3, and/or CEACAM-5), LAG3, VISTA, BTLA, TIGIT, LAIR1, CD160, 2B4 and TGF beta, or a fragment of any of these, and a second polypeptide which is an intracellular signaling domain described herein (e.g., comprising a costimulatory domain (e.g., 41BB, CD27, OX40 or CD28, e.g., as described herein) and/or a primary signaling domain (e.g., a CD3 zeta signaling domain described herein). In one embodiment, the agent comprises a first polypeptide of PD-1 or a fragment thereof, and a second polypeptide of an intracellular signaling domain described herein (e.g., a CD28 signaling domain described herein and/or a CD3 zeta signaling domain described herein).

### CD19 CAR and CD19-Binding Sequences

[0260] In some embodiments, the CAR IL-15R/IL-15-expressing cell described herein is a CD19 CAR-expressing cell (e.g., a cell expressing a CAR that binds to human CD19).

[0261] In one embodiment, the antigen binding domain of the CD19 CAR has the same or a similar binding specificity as the FMC63 scFv fragment described in Nicholson et al. Mol. Immun 34 (16-17): 1157-1165 (1997). In one embodiment, the antigen binding domain of the CD19 CAR includes the scFv fragment described in Nicholson et al. Mol. Immun. 34 (16-17): 1157-1165 (1997).

[0262] In some embodiments, the CD19 CAR includes an antigen binding domain (e.g., a humanized antigen binding domain) according to Table 3 of WO2014/153270, incorporated herein by reference. WO2014/153270 also describes methods of assaying the binding and efficacy of various CAR constructs.

[0263] In one aspect, the parental murine scFv sequence is the CAR19 construct provided in PCT publication WO2012/079000 (incorporated herein by reference). In one embodiment, the anti-CD19 binding domain is a scFv described in WO2012/079000.

[0264] In one embodiment, the CAR molecule comprises the fusion polypeptide sequence provided as SEQ ID NO: 12 in PCT publication WO2012/079000, which provides an scFv fragment of murine origin that specifically binds to human CD19.

[0265] In one embodiment, the CD19 CAR comprises an amino acid sequence provided as SEQ ID NO: 12 in PCT publication WO2012/079000. In embodiment, the amino acid sequence is

[0266] (MALPVTALLLPLALLLHAARP)diqmtqttsslsaslgdrvtiscrasqdiskylnwyqqkpdgtvklliyhtsrlhsg vpsrfsgsgsgtdysltisnleqediatyfcqqgntlpytfgggtkleitggggsggggsggggsevklqesgpglvapsqslsvtctvsgvslpdyg vswirqpprkglewlgviwgsettyynsalksrltiikdnsksqvflkmnslqtddtaiyycakhyyyggsyamdywgqgtsvtvsstapaprp ptpaptiasqplslrpeacrpaaggavhtrgldfacdiyiwaplagtcgvlllslvitlyckrgrkkllyifkqpfmrpvqttqeedgcscrfpeeeegg celrvkfsrsadapaykqgqnqlynelnlgrreeydvldkrrgrdpemggkprrknpqeglynelqkdkmaeayseigmkgerrrgkghdgl yqglstatkdtydalhmqalppr (SEQ ID NO: 1053), or a sequence substantially homologous thereto. The optional sequence of the signal peptide is shown in capital letters and parenthesis.

[0267] In one embodiment, the amino acid sequence is:

[0268] diqmtqttsslsaslgdrvtiscrasqdiskylnwyqqkpdgtvklliyhtsrlhsgvpsrfsgsgsgtdysltisnleqediatyfcqqgnt lpytfgggtkleitggggsggggsggggsevklqesgpglvapsqslsvtctvsgvslpdygvswirqpprkglewlgviwgsettyynsalksrl tiikdnsksqvflkmnslqtddtaiyycakhyyyggsyamdywgqgtsvtvsstttpaprpptpaptiasqplslrpeacrpaaggavhtrgldfa cdiyiwaplagtcgvlllslvitlyckrgrkkllyifkqpfmrpvqttqeedgcscrfpeeeeggcelrvkfsrsadapaykqgqnqlynelnlgrre eydvldkrrgrdpemggkprrknpqeglynelqkdkmaeayseigmkgeragkghdglyqglstatkdtydalhmqalppr (SEQ ID NO: 1054), or a sequence substantially homologous thereto.

[0269] In one embodiment, the CD19 CAR has the USAN designation TISAGENLECLEUCEL-T. In embodiments, CTL019 is made by a gene modification of T cells is mediated by stable insertion via transduction with a self-inactivating, replication deficient Lentiviral (LV) vector containing the CTL019 transgene under the control of the EF-1 alpha promoter. CTL019 can be a mixture of transgene positive and negative T cells that are delivered to the subject on the basis of percent transgene positive T cells.

[0270] In other embodiments, the CD19 CAR comprises an antigen binding domain (e.g., a humanized antigen binding domain) according to Table 3 of WO2014/153270, incorporated herein by reference.

[0271] Humanization of murine CD19 antibody is desired for the clinical setting, where the mouse-specific residues may induce a human-anti-mouse antigen (HAMA) response in patients who receive CART19 treatment, i.e., treatment with T cells transduced with the CAR19 construct. The production, characterization, and efficacy of humanized CD19 CAR sequences is described in International Application WO2014/153270 which is herein incorporated by reference in its entirety, including Examples 1-5 (p. 115-159).

[0272] In some embodiments, CD19 CAR constructs are described in PCT publication WO 2012/079000, incorporated herein by reference, and the amino acid sequence of the murine CD19 CAR and scFv constructs are shown in Table 11 below, or a sequence substantially identical to any of the aforesaid sequences (e.g., at least 85%, 90%, 95% or more identical to any of the sequences described herein).

TABLE 11
CD19 CAR Constructs

| SEQ ID | | |
|---|---|---|
| NO | Region | Sequence |
| CTL019 | | |
| SEQ ID NO: | CTL019 | MALPVTALLLPLALLLHAARPDIQMTQTTSSLSASLGDRVTISCRASQDIS |
| 1055 | Full amino | KYLNWYQQKPDGTVKLLIYHTSRLHSGVPSRFSGSGSGTDYSLTISNLEQE |
| | acid | DIATYFCQQGNTLPYTFGGGTKLEITGGGGSGGGGSGGGGSEVKLQESGP |
| | sequence | GLVAPSQSLSVTCTVSGVSLPDYGVSWIRQPPRKGLEWLGVIWGSETTYY |
| | | NSALKSRLTIIKDNSKSQVFLKMNSLQTDDTAIYYCAKHYYYGGSYAMD |
| | | YWGQGTSVTVSSTTTPAPRPPTPAPTIASQPLSLRPEACRPAAGGAVHTRG |
| | | LDFACDIYIWAPLAGTCGVLLLSLVITLYCKRGRKKLLYIFKQPFMRPVQT |
| | | TQEEDGCSCRFPEEEEGGCELRVKFSRSADAPAYKQGQNQLYNELNLGRR |
| | | EEYDVLDKRRGRDPEMGGKPRRKNPQEGLYNELQKDKMAEAYSEIGMK |
| | | GERRRGKGHDGLYQGLSTATKDTYDALHMQALPPR |
| SEQ ID NO: | CTL019 | ATGGCCTTACCAGTGACCGCCTTGCTCCTGCCGCTGGCCTTGCTGCTCC |
| 1056 | Full | ACGCCGCCAGGCCGGACATCCAGATGACACAGACTACATCCTCCCTGT |
| | nucleotide | CTGCCTCTCTGGGAGACAGAGTCACCATCAGTTGCAGGGCAAGTCAGG |
| | sequence | ACATTAGTAAATATTTAAATTGGTATCAGCAGAAACCAGATGGAACTG |
| | | TTAAACTCCTGATCTACCATACATCAAGATTACACTCAGGAGTCCCATC |
| | | AAGGTTCAGTGGCAGTGGGTCTGGAACAGATTATTCTCTCACCATTAG |
| | | CAACCTGGAGCAAGAAGATATTGCCACTTACTTTTGCCAACAGGGTAA |
| | | TACGCTTCCGTACACGTTCGGAGGGGGGACCAAGCTGGAGATCACAGG |
| | | TGGCGGTGGCTCGGGCGGTGGTGGGTCGGGTGGCGGCGGATCTGAGGT |
| | | GAAACTGCAGGAGTCAGGACCTGGCCTGGTGGCGCCCTCACAGAGCCT |
| | | GTCCGTCACATGCACTGTCTCAGGGGTCTCATTACCCGACTATGGTGTA |
| | | AGCTGGATTCGCCAGCCTCCACGAAAGGGTCTGGAGTGGCTGGGAGTA |
| | | ATATGGGGTAGTGAAACCACATACTATAATTCAGCTCTCAAATCCAGA |
| | | CTGACCATCATCAAGGACAACTCCAAGAGCCAAGTTTTCTTAAAAATG |
| | | AACAGTCTGCAAACTGATGACACAGCCATTTACTACTGTGCCAAACAT |
| | | TATTACTACGGTGGTAGCTATGCTATGGACTACTGGGGCCAAGGAACC |
| | | TCAGTCACCGTCTCCTCAACCACGACGCCAGCGCCGCGACCACCAACA |
| | | CCGGCGCCCACCATCGCGTCGCAGCCCCTGTCCCTGCGCCCAGAGGCG |
| | | TGCCGGCCAGCGGCGGGGGGCGCAGTGCACACGAGGGGGCTGGACTT |
| | | CGCCTGTGATATCTACATCTGGGCGCCCTTGGCCGGGACTTGTGGGGT |
| | | CCTTCTCCTGTCACTGGTTATCACCCTTTACTGCAAACGGGGCAGAAAG |
| | | AAACTCCTGTATATATTCAAACAACCATTTATGAGACCAGTACAAACT |
| | | ACTCAAGAGGAAGATGGCTGTAGCTGCCGATTTCCAGAAGAAGAAGA |
| | | AGGAGGATGTGAACTGAGAGTGAAGTTCAGCAGGAGCGCAGACGCCC |
| | | CCGCGTACAAGCAGGGCCAGAACCAGCTCTATAACGAGCTCAATCTAG |
| | | GACGAAGAGAGGAGTACGATGTTTTGGACAAGAGACGTGGCCGGGAC |
| | | CCTGAGATGGGGGGAAAGCCGAGAAGGAAGAACCCTCAGGAAGGCCT |
| | | GTACAATGAACTGCAGAAAGATAAGATGGCGGAGGCCTACAGTGAGA |
| | | TTGGGATGAAAGGCGAGCGCCGGAGGGGCAAGGGGCACGATGGCCTT |
| | | TACCAGGGTCTCAGTACAGCCACCAAGGACACCTACGACGCCCTTCAC |
| | | ATGCAGGCCCTGCCCCCTCGC |
| SEQ ID NO: | CTL019 | DIQMTQTTSSLSASLGDRVTISCRASQDISKYLNWYQQKPDGTVKLLIYHT |
| 1057 | scFv domain | SRLHSGVPSRFSGSGSGTDYSLTISNLEQEDIATYFCQQGNTLPYTFGGGTK |
| | | LEITGGGGSGGGGSGGGGSEVKLQESGPGLVAPSQSLSVTCTVSGVSLPD |
| | | YGVSWIRQPPRKGLEWLGVIWGSETTYYNSALKSRLTIIKDNSKSQVFLK |
| | | MNSLQTDDTAIYYCAKHYYYGGSYAMDYWGQGTSVTVSS |
| mCAR1 | | |
| SEQ ID NO: | mCAR1 | QVQLLESGAELVRPGSSVKISCKASGYAFSSYWMNWVKQRPGQGLEWIG |
| 1058 | scFv | QIYPGDGDTNYNGKFKGQATLTADKSSSTAYMQLSGLTSEDSAVYSCAR |
| | | KTISSVVDFYFDYWGQGTTVTGGGSGGGSGGGSGGGSELVLTQSPKFMST |
| | | SVGDRVSVTCKASQNVGTNVAWYQQKPGQSPKPLIYSATYRNSGVPDRF |
| | | TGSGSGTDFTLTITNVQSKDLADYFCQYNRYPYTSFFFTKLEIKRRS |
| SEQ ID NO: | mCAR1 Full | QVQLLESGAELVRPGSSVKISCKASGYAFSSYWMNWVKQRPGQGLEWIG |
| 1059 | amino acid | QIYPGDGDTNYNGKFKGQATLTADKSSSTAYMQLSGLTSEDSAVYSCAR |
| | sequence | KTISSVVDFYFDYWGQGTTVTGGGSGGGSGGGSGGGSELVLTQSPKFMST |
| | | SVGDRVSVTCKASQNVGTNVAWYQQKPGQSPKPLIYSATYRNSGVPDRF |
| | | TGSGSGTDFTLTITNVQSKDLADYFCQYNRYPYTSFFFTKLEIKRRSKIEV |
| | | MYPPPYLDNEKSNGTIIHVKGKHLCPSPLFPGPSKPFWVLVVVGGVLACY |
| | | SLLVTVAFIIFWVRSKRSRLLHSDYMNMTPRRPGPTRKHYQPYAPPRDFA |
| | | AYRSRVKFSRSADAPAYQQGQNQLYNELNLGRREEYDVLDKRRGRDPE |
| | | MGGKPRRKNPQEGLYNELQKDKMAEAYSEIGMKGERRRGKGHDGLYQG |
| | | LSTATKDTYDALHMQALPPR |
| mCAR2 | | |
| SEQ ID NO: | mCAR2 | DIQMTQTTSSLSASLGDRVTISCRASQDISKYLNWYQQKPDGTVKLLIYHT |
| 1060 | scFv | SRLHSGVPSRFSGSGSGTDYSLTISNLEQEDIATYFCQQGNTLPYTFGGGTK |
| | | LEITGSTSGSGKPGSGEGSTKGEVKLQESGPGLVAPSQSLSVTCTVSGVSLP |
| | | DYGVSWIRQPPRKGLEWLGVIWGSETTYYNSALKSRLTIIKDNSKSQVFL |
| | | KNINSLQTDDTAIYYCAKHYYYGGSYAMDYWGQGTSVTVSSE |
| SEQ ID NO: | mCAR2 | DIQMTQTTSSLSASLGDRVTISCRASQDISKYLNWYQQKPDGTVKLLIYHT |
| 1061 | amino acid | SRLHSGVPSRFSGSGSGTDYSLTISNLEQEDIATYFCQQGNTLPYTFGGGTK |
| | sequence | LEITGSTSGSGKPGSGEGSTKGEVKLQESGPGLVAPSQSLSVTCTVSGVSLP |
| | | DYGVSWIRQPPRKGLEWLGVIWGSETTYYNSALKSRLTIIKDNSKSQVFL |
| | | KMNSLQTDDTAIYYCAKHYYYGGSYAMDYWGQGTSVTVSSESKYGPPC |
| | | PPCPMFWVLVVVGGVLACYSLLVTVAFIIFWVKRGRKKLLYIFKQPFMRP |
| | | VQTTQEEDGCSCRFEEEEGGCELRVKFSRSADAPAYQQGQNQLYNELNL |
| | | GRREEYDVLDKRRGRDPEMGGKPRRKNPQEGLYNELQKDKMAEAYSEI |
| | | GMKGERRRGKGHDGLYQGLSTATKDTYDALHMQALPPRL |
| SEQ ID NO: | mCAR2 full | DIQMTQTTSSLSASLGDRVTISCRASQDISKYLNWYQQKPDGTVKLLIYHT |
| 1062 | amino acid | SRLHSGVPSRFSGSGSGTDYSLTISNLEQEDIATYFCQQGNTLPYTFGGGTK |
| | sequence | LEITGSTSGSGKPGSGEGSTKGEVKLQESGPGLVAPSQSLSVTCTVSGVSLP |
| | | DYGVSWIRQPPRKGLEWLGVIWGSETTYYNSALKSRLTIIKDNSKSQVFL |
| | | KMNSLQTDDTAIYYCAKHYYYGGSYAMDYWGQGTSVTVSSESKYGPPC |
| | | PPCPMFWVLVVVGGVLACYSLLVTVAFIIFWVKRGRKKLLYIFKQPFMRP |
| | | VQTTQEEDGCSCRFEEEEGGCELRVKFSRSADAPAYQQGQNQLYNELNL |
| | | GRREEYDVLDKRRGRDPEMGGKPRRKNPQEGLYNELQKDKMAEAYSEI |
| | | GMKGERRRGKGHDGLYQGLSTATKDTYDALHMQALPPRLEGGGEGRGS |
| | | LLTCGDVEENPGPRMLLLVTSLLLCELPHPAFLLIPRKVCNGIGIGEFKDSL |
| | | SINATNIKHFKNCTSISGDLHILPVAFRGDSFTHTPPLDPQELDILKTVKEIT |
| | | GFLLIQAWPENRTDLHAFENLEIIRGRTKQHGQFSLAVVSLNITSLGLRSLK |
| | | EISDGDVIISGNKNLCYANTINWKKLFGTSGQKTKIISNRGENSCKATGQV |
| | | CHALCSPEGCWGPEPRDCVSCRNVSRGRECVDKCNLLEGEPREFVENSEC |
| | | IQCHPECLPQAMNITCTGRGPDNCIQCAHYIDGPHCVKTCPAGVMGENNT |
| | | LVWKYADAGHVCHLCHPNCTYGCTGPGLEGCPTNGPKIPSIATGMVGAL |
| | | LLLLVVALGIGLFM |
| mCAR3 | | |
| SEQ ID NO: | mCAR3 | DIQMTQTTSSLSASLGDRVTISCRASQDISKYLNWYQQKPDGTVKLLIYHT |
| 1063 | scFv | SRLHSGVPSRFSGSGSGTDYSLTISNLEQEDIATYFCQQGNTLPYTFGGGTK |
| | | LEITGSTSGSGKPGSGEGSTKGEVKLQESGPGLVAPSQSLSVTCTVSGVSLP |
| | | DYGVSWIRQPPRKGLEWLGVIWGSETTYYNSALKSRLTIIKDNSKSQVFL |
| | | KNINSLQTDDTAIYYCAKHYYYGGSYAMDYWGQGTSVTVSS |
| SEQ ID NO: | mCAR3 full | DIQMTQTTSSLSASLGDRVTISCRASQDISKYLNWYQQKPDGTVKLLIYHT |
| 1064 | amino acid | SRLHSGVPSRFSGSGSGTDYSLTISNLEQEDIATYFCQQGNTLPYTFGGGTK |
| | sequence | LEITGSTSGSGKPGSGEGSTKGEVKLQESGPGLVAPSQSLSVTCTVSGVSLP |
| | | DYGVSWIRQPPRKGLEWLGVIWGSETTYYNSALKSRLTIIKDNSKSQVFL |
| | | KMNSLQTDDTAIYYCAKHYYYGGSYAMDYWGQGTSVTVSSAAAIEVMY |
| | | PPPYLDNEKSNGTIIHVKGKHLCPSPLFPGPSKPFWVLVVVGGVLACYSLL |
| | | VTVAFIIFWVRSKRSRLLHSDYMNMTPRRPGPTRKHYQPYAPPRDFAAYR |
| | | SRVKFSRSADAPAYQQGQNQLYNELNLGRREEYDVLDKRRGRDPEMGG |
| | | KPRRKNPQEGLYNELQKDKMAEAYSEIGMKGERRRGKGHDGLYQGLST |
| | | ATKDTYDALHMQALPPR |
| SSJ25-C1 | | |
| SEQ ID NO: | SSJ25-C1 | QVQLLESGAELVRPGSSVKISCKASGYAFSSYWMNWVKQRPGQGLEWIG |
| 1065 | VH | QIYPGDGDTNYNGKFKGQATLTADKSSSTAYMQLSGLTSEDSAVYSCAR |
| | sequence | KTISSVVDFYFDYWGQGTTVT |
| SEQ ID NO: | SSJ25-C1 | ELVLTQSPKFMSTSVGDRVSVTCKASQNVGTNVAWYQQKPGQSPKPLIYS |
| 1066 | VL | ATYRNSGVPDRFTGSGSGTDFTLTITNVQSKDLADYFYFCQYNRYPYTSG |
| | | GGTKLEIKRRS |
| Humanized | | |
| CAR1 | | |
| SEQ ID NO: | CAR1 scFv | EIVMTQSPATLSLSPGERATLSCRASQDISKYLNWYQQKPGQAPRLLIYHT |
| 1067 | domain | SRLHSGIPARFSGSGSGTDYTLTISSLQPEDFAVYFCQQGNTLPYTFGQGTK |
| | | LEIKGGGGSGGGGSGGGGSQVQLQESGPGLVKPSETLSLTCTVSGVSLPD |
| | | YGVSWIRQPPGKGLEWIGVIWGSETTYYSSSLKSRVTISKDNSKNQVSLKL |
| | | SSVTAADTAVYYCAKHYYYGGSYAMDYWGQGTLVTVSS |
| SEQ ID NO: | CAR 1- | MALPVTALLLPLALLLHAARPEIVMTQSPATLSLSPGERATLSCRASQDIS |
| 1068 | Full-aa | KYLNWYQQKPGQAPRLLIYHTSRLHSGIPARFSGSGSGTDYTLTISSLQPE |
| | | DFAVYFCQQGNTLPYTFGQGTKLEIKGGGGSGGGGSGGGGSQVQLQESG |
| | | PGLVKPSETLSLTCTVSGVSLPDYGVSWIRQPPGKGLEWIGVIWGSETTYY |
| | | SSSLKSRVTISKDNSKNQVSLKLSSVTAADTAVYYCAKHYYYGGSYAMD |
| | | YWGQGTLVTVSSTTTPAPRPPTPAPTIASQPLSLRPEACRPAAGGAVHTRG |
| | | LDFACDIYIWAPLAGTCGVLLLSLVITLYCKRGRKKLLYIFKQPFMRPVQT |
| | | TQEEDGCSCRFPEEEEGGCELRVKFSRSADAPAYKQGQNQLYNELNLGRR |
| | | EEYDVLDKRRGRDPEMGGKPRRKNPQEGLYNELQKDKMAEAYSEIGMK |
| | | GERRRGKGHDGLYQGLSTATKDTYDALHMQALPPR |
| Humanized | | |
| CAR2 | | |
| SEQ ID NO: | CAR2 scFv | EIVMTQSPATLSLSPGERATLSCRASQDISKYLNWYQQKPGQAPRLLIYHT |
| 1069 | domain-aa | SRLHSGIPARFSGSGSGTDYTLTISSLQPEDFAVYFCQQGNTLPYTFGQGTK |
| | (Linker is | LEIKGGGGSGGGGSGGGGSQVQLQESGPGLVKPSETLSLTCTVSGVSLPD |
| | underlined) | YGVSWIRQPPGKGLEWIGVIWGSETTYYQSSLKSRVTISKDNSKNQVSLK |
| | | LSSVTAADTAVYYCAKHYYYGGSYAMDYWGQGTLVTVSS |
| SEQ ID NO: | CAR2 scFv | atggccctccctgtcaccgccctgctgcttccgctggctcttctgctccacgccgctcggcccgaaattgtgatgaccc |
| 1070 | domain-nt | agtcacccgccactcttagcctttcacccggtgagcgcgcaaccctgtcttgcagagcctcccaagacatctcaaaat |
| | | accttaattggtatcaacagaagcccggacaggctcctcgccttctgatctaccacaccagccggctccattctggaat |
| | | ccctgccaggttcagcggtagcggatctgggaccgactacaccctcactatcagctcactgcagccagaggacttcg |
| | | ctgtctatttctgtcagcaagggaacaccctgccctacacctttggacagggcaccaagctcgagattaaaggtggag |
| | | gtggcagcggaggaggtgggtccggcggtggaggaagccaggtccaactccaagaaagcggaccgggtcttgtg |
| | | aagccatcagaaactctttcactgacttgtactgtgagcggagtgtctctccccgattacggggtgtcttggatcagaca |
| | | gccaccggggaagggtctggaatggattggagtgatttggggctctgagactacttactaccaatcatccctcaagtc |
| | | acgcgtcaccatctcaaaggacaactctaagaatcaggtgtcactgaaactgtcatctgtgaccgcagccgacaccg |
| | | ccgtgtactattgcgctaagcattactattatggcgggagctacgcaatggattactggggacagggtactctggtcac |
| | | cgtgtccagccaccaccatcatcaccatcaccat |
| SEQ ID NO: | CAR 2- | MALPVTALLLPLALLLHAARPEIVMTQSPATLSLSPGERATLSCRASQDIS |
| 1071 | Full-aa | KYLNWYQQKPGQAPRLLIYHTSRLHSGIPARFSGSGSGTDYTLTISSLQPE |
| | | DFAVYFCQQGNTLPYTFGQGTKLEIKGGGGSGGGGSGGGGSQVQLQESG |
| | | PGLVKPSETLSLTCTVSGVSLPDYGVSWIRQPPGKGLEWIGVIWGSETTYY |
| | | QSSLKSRVTISKDNSKNQVSLKLSSVTAADTAVYYCAKHYYYGGSYAMD |
| | | YWGQGTLVTVSSTTTPAPRPPTPAPTIASQPLSLRPEACRPAAGGAVHTRG |
| | | LDFACDIYIWAPLAGTCGVLLLSLVITLYCKRGRKKLLYIFKQPFMRPVQT |
| | | TQEEDGCSCRFPEEEEGGCELRVKFSRSADAPAYKQGQNQLYNELNLGRR |
| | | EEYDVLDKRRGRDPEMGGKPRRKNPQEGLYNELQKDKMAEAYSEIGMK |
| | | GERRRGKGHDGLYQGLSTATKDTYDALHMQALPPR |
| SEQ ID NO: | CAR 2- | atggccctccctgtcaccgccctgctgcttccgctggctcttctgctccacgccgctcggcccgaaattgtgatgaccc |
| 1072 | Full-nt | agtcacccgccactcttagcctttcacccggtgagcgcgcaaccctgtcttgcagagcctcccaagacatctcaaaat |
| | | accttaattggtatcaacagaagcccggacaggctcctcgccttctgatctaccacaccagccggctccattctggaat |
| | | ccctgccaggttcagcggtagcggatctgggaccgactacaccctcactatcagctcactgcagccagaggacttcg |
| | | ctgtctatttctgtcagcaagggaacaccctgccctacacctttggacagggcaccaagctcgagattaaaggtggag |
| | | gtggcagcggaggaggtgggtccggcggtggaggaagccaggtccaactccaagaaagcggaccgggtcttgtg |
| | | aagccatcagaaactctttcactgacttgtactgtgagcggagtgtctctccccgattacggggtgtcttggatcagaca |
| | | gccaccggggaagggtctggaatggattggagtgatttggggctctgagactacttactaccaatcatccctcaagtc |
| | | acgcgtcaccatctcaaaggacaactctaagaatcaggtgtcactgaaactgtcatctgtgaccgcagccgacaccg |
| | | ccgtgtactattgcgctaagcattactattatggcgggagctacgcaatggattactggggacagggtactctggtcac |
| | | cgtgtccagcaccactaccccagcaccgaggccacccaccccggctcctaccatcgcctcccagcctctgtccctgc |
| | | gtccggaggcatgtagacccgcagctggtggggccgtgcatacccggggtcttgacttcgcctgcgatatctacattt |
| | | gggcccctctggctggtacttgcggggtcctgctgctttcactcgtgatcactctttactgtaagcgcggtcggaagaa |
| | | gctgctgtacatctttaagcaacccttcatgaggcctgtgcagactactcaagaggaggacggctgttcatgccggttc |
| | | ccagaggaggaggaaggcggctgcgaactgcgcgtgaaattcagccgcagcgcagatgctccagcctacaagca |
| | | ggggcagaaccagctctacaacgaactcaatcttggtcggagagaggagtacgacgtgctggacaagcggagag |
| | | gacgggacccagaaatgggcgggaagccgcgcagaaagaatccccaagagggcctgtacaacgagctccaaaa |
| | | ggataagatggcagaagcctatagcgagattggtatgaaaggggaacgcagaagaggcaaaggccacgacggac |
| | | tgtaccagggactcagcaccgccaccaaggacacctatgacgctcttcacatgcaggccctgccgcctcgg |
| SEQ ID NO: | CAR2- | MALPVTALLLPLALLLHAARPeivmtqspatlslspgeratlscrasqdiskylnwyqqkpgq |
| 1073 | Soluble | aprlliyhtsrlhsgiparfsgsgsgtdytltisslqpedfavyfcqqgntlpytfgqgtkleikggggsggggsgggg |
| | scFv-aa | sqvqlqesgpglvkpsetlsltctvsgvslpdygvswirqppgkglewigviwgsettyyqsslksrvtiskdnsk |
| | | nqvslklssvtaadtavyycakhyyyggsyamdywgqgtlvtvsshhhhhhhh |
| Humanized | | |
| CAR3 | | |
| SEQ ID NO: | CAR3 scFv | QVQLQESGPGLVKPSETLSLTCTVSGVSLPDYGVSWIRQPPGKGLEWIGVI |
| 1074 | domain | WGSETTYYSSSLKSRVTISKDNSKNQVSLKLSSVTAADTAVYYCAKHYY |
| | | YGGSYAMDYWGQGTLVTVSSGGGGSGGGGSGGGGSEIVMTQSPATLSLS |
| | | PGERATLSCRASQDISKYLNWYQQKPGQAPRLLIYHTSRLHSGIPARFSGS |
| | | GSGTDYTLTISSLQPEDFAVYFCQQGNTLPYTFGQGTKLEIK |
| SEQ ID NO: | CAR 3- | MALPVTALLLPLALLLHAARPQVQLQESGPGLVKPSETLSLTCTVSGVSLP |
| 1075 | Full-aa | DYGVSWIRQPPGKGLEWIGVIWGSETTYYSSSLKSRVTISKDNSKNQVSLK |
| | | LSSVTAADTAVYYCAKHYYYGGSYAMDYWGQGTLVTVSSGGGGSGGG |
| | | GSGGGGSEIVMTQSPATLSLSPGERATLSCRASQDISKYLNWYQQKPGQA |
| | | PRLLIYHTSRLHSGIPARFSGSGSGTDYTLTISSLQPEDFAVYFCQQGNTLP |
| | | YTFGQGTKLEIKTTTPAPRPPTPAPTIASQPLSLRPEACRPAAGGAVHTRGL |
| | | DFACDIYIWAPLAGTCGVLLLSLVITLYCKRGRKKLLYIFKQPFMRPVQTT |
| | | QEEDGCSCRFPEEEEGGCELRVKFSRSADAPAYKQGQNQLYNELNLGRRE |
| | | EYDVLDKRRGRDPEMGGKPRRKNPQEGLYNELQKDKMAEAYSEIGMKG |
| | | ERRRGKGHDGLYQGLSTATKDTYDALHMQALPPR |
| Humanized | | |
| CAR4 | | |
| SEQ ID NO: | CAR4 scFv | QVQLQESGPGLVKPSETLSLTCTVSGVSLPDYGVSWIRQPPGKGLEWIGVI |
| 1076 | domain | WGSETTYYQSSLKSRVTISKDNSKNQVSLKLSSVTAADTAVYYCAKHYY |
| | | YGGSYAMDYWGQGTLVTVSSGGGGSGGGGSGGGGSEIVMTQSPATLSLS |
| | | PGERATLSCRASQDISKYLNWYQQKPGQAPRLLIYHTSRLHSGIPARFSGS |
| | | GSGTDYTLTISSLQPEDFAVYFCQQGNTLPYTFGQGTKLEIK |
| SEQ ID NO: | CAR 4- | MALPVTALLLPLALLLHAARPQVQLQESGPGLVKPSETLSLTCTVSGVSLP |
| 1077 | Full-aa | DYGVSWIRQPPGKGLEWIGVIWGSETTYYQSSLKSRVTISKDNSKNQVSL |
| | | KLSSVTAADTAVYYCAKHYYYGGSYAMDYWGQGTLVTVSSGGGGSGG |
| | | GGSGGGGSEIVMTQSPATLSLSPGERATLSCRASQDISKYLNWYQQKPGQ |
| | | APRLLIYHTSRLHSGIPARFSGSGSGTDYTLTISSLQPEDFAVYFCQQGNTL |
| | | PYTFGQGTKLEIKTTTPAPRPPTPAPTIASQPLSLRPEACRPAAGGAVHTRG |
| | | LDFACDIYIWAPLAGTCGVLLLSLVITLYCKRGRKKLLYIFKQPFMRPVQT |
| | | TQEEDGCSCRFPEEEEGGCELRVKFSRSADAPAYKQGQNQLYNELNLGRR |
| | | EEYDVLDKRRGRDPEMGGKPRRKNPQEGLYNELQKDKMAEAYSEIGMK |
| | | GERRRGKGHDGLYQGLSTATKDTYDALHMQALPPR |
| Humanized | | |
| CAR5 | | |
| SEQ ID NO: | CARS scFv | EIVMTQSPATLSLSPGERATLSCRASQDISKYLNWYQQKPGQAPRLLIYHT |
| 1078 | domain | SRLHSGIPARFSGSGSGTDYTLTISSLQPEDFAVYFCQQGNTLPYTFGQGTK |
| | | LEIKGGGGSGGGGSGGGGSGGGGSQVQLQESGPGLVKPSETLSLTCTVSG |
| | | VSLPDYGVSWIRQPPGKGLEWIGVIWGSETTYYSSSLKSRVTISKDNSKNQ |
| | | VSLKLSSVTAADTAVYYCAKHYYYGGSYAMDYWGQGTLVTVSS |
| SEQ ID NO: | CAR 5- | MALPVTALLLPLALLLHAARPEIVMTQSPATLSLSPGERATLSCRASQDIS |
| 1079 | Full-aa | KYLNWYQQKPGQAPRLLIYHTSRLHSGIPARFSGSGSGTDYTLTISSLQPE |
| | | DFAVYFCQQGNTLPYTFGQGTKLEIKGGGGSGGGGSGGGGSGGGGSQVQ |
| | | LQESGPGLVKPSETLSLTCTVSGVSLPDYGVSWIRQPPGKGLEWIGVIWGS |
| | | ETTYYSSSLKSRVTISKDNSKNQVSLKLSSVTAADTAVYYCAKHYYYGGS |
| | | YAMDYWGQGTLVTVSSTTTPAPRPPTPAPTIASQPLSLRPEACRPAAGGA |
| | | VHTRGLDFACDIYIWAPLAGTCGVLLLSLVITLYCKRGRKKLLYIFKQPFM |
| | | RPVQTTQEEDGCSCRFPEEEEGGCELRVKFSRSADAPAYKQGQNQLYNEL |
| | | NLGRREEYDVLDKRRGRDPEMGGKPRRKNPQEGLYNELQKDKMAEAYS |
| | | EIGMKGERRRGKGHDGLYQGLSTATKDTYDALHMQALPPR |
| Humanized | | |
| CAR6 | | |
| SEQ ID NO: | CAR6 | EIVMTQSPATLSLSPGERATLSCRASQDISKYLNWYQQKPGQAPRLLIYHT |
| 1080 | scFv domain | SRLHSGIPARFSGSGSGTDYTLTISSLQPEDFAVYFCQQGNTLPYTFGQGTK |
| | | LEIKGGGGSGGGGSGGGGSGGGGSQVQLQESGPGLVKPSETLSLTCTVSG |
| | | VSLPDYGVSWIRQPPGKGLEWIGVIWGSETTYYQSSLKSRVTISKDNSKNQ |
| | | VSLKLSSVTAADTAVYYCAKHYYYGGSYAMDYWGQGTLVTVSS |
| SEQ ID NO: | CAR6- | MALPVTALLLPLALLLHAARPEIVMTQSPATLSLSPGERATLSCRASQDIS |
| 1081 | Full-aa | KYLNWYQQKPGQAPRLLIYHTSRLHSGIPARFSGSGSGTDYTLTISSLQPE |
| | | DFAVYFCQQGNTLPYTFGQGTKLEIKGGGGSGGGGSGGGGSGGGGSQVQ |
| | | LQESGPGLVKPSETLSLTCTVSGVSLPDYGVSWIRQPPGKGLEWIGVIWGS |
| | | ETTYYQSSLKSRVTISKDNSKNQVSLKLSSVTAADTAVYYCAKHYYYGGS |
| | | YAMDYWGQGTLVTVSSTTTPAPRPPTPAPTIASQPLSLRPEACRPAAGGA |
| | | VHTRGLDFACDIYIWAPLAGTCGVLLLSLVITLYCKRGRKKLLYIFKQPFM |
| | | RPVQTTQEEDGCSCRFPEEEEGGCELRVKFSRSADAPAYKQGQNQLYNEL |
| | | NLGRREEYDVLDKRRGRDPEMGGKPRRKNPQEGLYNELQKDKMAEAYS |
| | | EIGMKGERRRGKGHDGLYQGLSTATKDTYDALHMQALPPR |
| Humanized | | |
| CAR7 | | |
| SEQ ID NO: | CAR7 scFv | QVQLQESGPGLVKPSETLSLTCTVSGVSLPDYGVSWIRQPPGKGLEWIGVI |
| 1082 | domain | WGSETTYYSSSLKSRVTISKDNSKNQVSLKLSSVTAADTAVYYCAKHYY |
| | | YGGSYAMDYWGQGTLVTVSSGGGGSGGGGSGGGGSGGGGSEIVMTQSP |
| | | ATLSLSPGERATLSCRASQDISKYLNWYQQKPGQAPRLLIYHTSRLHSGIP |
| | | ARFSGSGSGTDYTLTISSLQPEDFAVYFCQQGNTLPYTFGQGTKLEIK |
| SEQ ID NO: | CAR 7 | MALPVTALLLPLALLLHAARPQVQLQESGPGLVKPSETLSLTCTVSGVSLP |
| 1083 | Full-aa | DYGVSWIRQPPGKGLEWIGVIWGSETTYYSSSLKSRVTISKDNSKNQVSLK |
| | | LSSVTAADTAVYYCAKHYYYGGSYAMDYWGQGTLVTVSSGGGGSGGG |
| | | GSGGGGSGGGGSEIVMTQSPATLSLSPGERATLSCRASQDISKYLNWYQQ |
| | | KPGQAPRLLIYHTSRLHSGIPARFSGSGSGTDYTLTISSLQPEDFAVYFCQQ |
| | | GNTLPYTFGQGTKLEIKTTTPAPRPPTPAPTIASQPLSLRPEACRPAAGGAV |
| | | HTRGLDFACDIYIWAPLAGTCGVLLLSLVITLYCKRGRKKLLYIFKQPFMR |
| | | PVQTTQEEDGCSCRFPEEEEGGCELRVKFSRSADAPAYKQGQNQLYNELN |
| | | LGRREEYDVLDKRRGRDPEMGGKPRRKNPQEGLYNELQKDKMAEAYSEI |
| | | GMKGERRRGKGHDGLYQGLSTATKDTYDALHMQALPPR |
| Humanized | | |
| CAR8 | | |
| SEQ ID NO: | CAR8 scFv | QVQLQESGPGLVKPSETLSLTCTVSGVSLPDYGVSWIRQPPGKGLEWIGVI |
| 1084 | domain | WGSETTYYQSSLKSRVTISKDNSKNQVSLKLSSVTAADTAVYYCAKHYY |
| | | YGGSYAMDYWGQGTLVTVSSGGGGSGGGGSGGGGSGGGGSEIVMTQSP |
| | | ATLSLSPGERATLSCRASQDISKYLNWYQQKPGQAPRLLIYHTSRLHSGIP |
| | | ARFSGSGSGTDYTLTISSLQPEDFAVYFCQQGNTLPYTFGQGTKLEIK |
| SEQ ID NO: | CAR 8- | MALPVTALLLPLALLLHAARPQVQLQESGPGLVKPSETLSLTCTVSGVSLP |
| 1085 | Full-aa | DYGVSWIRQPPGKGLEWIGVIWGSETTYYQSSLKSRVTISKDNSKNQVSL |
| | | KLSSVTAADTAVYYCAKHYYYGGSYAMDYWGQGTLVTVSSGGGGSGG |
| | | GGSGGGGSGGGGSEIVMTQSPATLSLSPGERATLSCRASQDISKYLNWYQ |
| | | QKPGQAPRLLIYHTSRLHSGIPARFSGSGSGTDYTLTISSLQPEDFAVYFCQ |
| | | QGNTLPYTFGQGTKLEIKTTTPAPRPPTPAPTIASQPLSLRPEACRPAAGGA |
| | | VHTRGLDFACDIYIWAPLAGTCGVLLLSLVITLYCKRGRKKLLYIFKQPFM |
| | | RPVQTTQEEDGCSCRFPEEEEGGCELRVKFSRSADAPAYKQGQNQLYNEL |
| | | NLGRREEYDVLDKRRGRDPEMGGKPRRKNPQEGLYNELQKDKMAEAYS |
| | | EIGMKGERRRGKGHDGLYQGLSTATKDTYDALHMQALPPR |
| Humanized | | |
| CAR9 | | |
| SEQ ID NO: | CAR9 scFv | EIVMTQSPATLSLSPGERATLSCRASQDISKYLNWYQQKPGQAPRLLIYHT |
| 1086 | domain | SRLHSGIPARFSGSGSGTDYTLTISSLQPEDFAVYFCQQGNTLPYTFGQGTK |
| | | LEIKGGGGSGGGGSGGGGSGGGGSQVQLQESGPGLVKPSETLSLTCTVSG |
| | | VSLPDYGVSWIRQPPGKGLEWIGVIWGSETTYYNSSLKSRVTISKDNSKNQ |
| | | VSLKLSSVTAADTAVYYCAKHYYYGGSYAMDYWGQGTLVTVSS |
| SEQ ID NO: | CAR 9- | MALPVTALLLPLALLLHAARPEIVMTQSPATLSLSPGERATLSCRASQDIS |
| 1087 | Full-aa | KYLNWYQQKPGQAPRLLIYHTSRLHSGIPARFSGSGSGTDYTLTISSLQPE |
| | | DFAVYFCQQGNTLPYTFGQGTKLEIKGGGGSGGGGSGGGGSGGGGSQVQ |
| | | LQESGPGLVKPSETLSLTCTVSGVSLPDYGVSWIRQPPGKGLEWIGVIWGS |
| | | ETTYYNSSLKSRVTISKDNSKNQVSLKLSSVTAADTAVYYCAKHYYYGGS |
| | | YAMDYWGQGTLVTVSSTTTPAPRPPTPAPTIASQPLSLRPEACRPAAGGA |
| | | VHTRGLDFACDIYIWAPLAGTCGVLLLSLVITLYCKRGRKKLLYIFKQPFM |
| | | RPVQTTQEEDGCSCRFPEEEEGGCELRVKFSRSADAPAYKQGQNQLYNEL |
| | | NLGRREEYDVLDKRRGRDPEMGGKPRRKNPQEGLYNELQKDKMAEAYS |
| | | EIGMKGERRRGKGHDGLYQGLSTATKDTYDALHMQALPPR |
| Humanized | | |
| CAR10 | | |
| SEQ ID NO: | CAR10 scFv | QVQLQESGPGLVKPSETLSLTCTVSGVSLPDYGVSWIRQPPGKGLEWIGVI |
| 1088 | domain | WGSETTYYNSSLKSRVTISKDNSKNQVSLKLSSVTAADTAVYYCAKHYY |
| | | YGGSYAMDYWGQGTLVTVSSGGGGSGGGGSGGGGSGGGGSEIVMTQSP |
| | | ATLSLSPGERATLSCRASQDISKYLNWYQQKPGQAPRLLIYHTSRLHSGIP |
| | | ARFSGSGSGTDYTLTISSLQPEDFAVYFCQQGNTLPYTFGQGTKLEIK |
| SEQ ID NO: | CAR 10 | MALPVTALLLPLALLLHAARPEIVMTQSPATLSLSPGERATLSCRASQDIS |
| 1089 | Full-aa | KYLNWYQQKPGQAPRLLIYHTSRLHSGIPARFSGSGSGTDYTLTISSLQPE |
| | | DFAVYFCQQGNTLPYTFGQGTKLEIKGGGGSGGGGSGGGGSGGGGSQVQ |
| | | LQESGPGLVKPSETLSLTCTVSGVSLPDYGVSWIRQPPGKGLEWIGVIWGS |
| | | ETTYYNSSLKSRVTISKDNSKNQVSLKLSSVTAADTAVYYCAKHYYYGGS |
| | | YAMDYWGQGTLVTVSSTTTPAPRPPTPAPTIASQPLSLRPEACRPAAGGA |
| | | VHTRGLDFACDIYIWAPLAGTCGVLLLSLVITLYCKRGRKKLLYIFKQPFM |
| | | RPVQTTQEEDGCSCRFPEEEEGGCELRVKFSRSADAPAYKQGQNQLYNEL |
| | | NLGRREEYDVLDKRRGRDPEMGGKPRRKNPQEGLYNELQKDKMAEAYS |
| | | EIGMKGERRRGKGHDGLYQGLSTATKDTYDALHMQALPPR |
| Humanized | | |
| CAR11 | | |
| SEQ ID NO: | CAR11 | EIVMTQSPATLSLSPGERATLSCRASQDISKYLNWYQQKPGQAPRLLIYHT |
| 1090 | scFv domain | SRLHSGIPARFSGSGSGTDYTLTISSLQPEDFAVYFCQQGNTLPYTFGQGTK |
| | | LEIKGGGGSGGGGSGGGGSQVQLQESGPGLVKPSETLSLTCTVSGVSLPD |
| | | YGVSWIRQPPGKGLEWIGVIWGSETTYYNSSLKSRVTISKDNSKNQVSLK |
| | | LSSVTAADTAVYYCAKHYYYGGSYAMDYWGQGTLVTVSS |
| SEQ ID NO: | CAR 11 | MALPVTALLLPLALLLHAARPQVQLQESGPGLVKPSETLSLTCTVSGVSLP |
| 1091 | Full-aa | DYGVSWIRQPPGKGLEWIGVIWGSETTYYNSSLKSRVTISKDNSKNQVSL |
| | | KLSSVTAADTAVYYCAKHYYYGGSYAMDYWGQGTLVTVSSGGGGSGG |
| | | GGSGGGGSGGGGSEIVMTQSPATLSLSPGERATLSCRASQDISKYLNWYQ |
| | | QKPGQAPRLLIYHTSRLHSGIPARFSGSGSGTDYTLTISSLQPEDFAVYFCQ |
| | | QGNTLPYTFGQGTKLEIKTTTPAPRPPTPAPTIASQPLSLRPEACRPAAGGA |
| | | VHTRGLDFACDIYIWAPLAGTCGVLLLSLVITLYCKRGRKKLLYIFKQPFM |
| | | RPVQTTQEEDGCSCRFPEEEEGGCELRVKFSRSADAPAYKQGQNQLYNEL |
| | | NLGRREEYDVLDKRRGRDPEMGGKPRRKNPQEGLYNELQKDKMAEAYS |
| | | EIGMKGERRRGKGHDGLYQGLSTATKDTYDALHMQALPPR |
| Humanized | | |
| CAR12 | | |
| SEQ ID NO: | CAR12 | QVQLQESGPGLVKPSETLSLTCTVSGVSLPDYGVSWIRQPPGKGLEWIGVI |
| 1092 | scFv domain | WGSETTYYNSSLKSRVTISKDNSKNQVSLKLSSVTAADTAVYYCAKHYY |
| | | YGGSYAMDYWGQGTLVTVSSGGGGSGGGGSGGGGSEIVMTQSPATLSLS |
| | | PGERATLSCRASQDISKYLNWYQQKPGQAPRLLIYHTSRLHSGIPARFSGS |
| | | GSGTDYTLTISSLQPEDFAVYFCQQGNTLPYTFGQGTKLEIK |
| SEQ ID NO: | CAR 12- | MALPVTALLLPLALLLHAARPEIVMTQSPATLSLSPGERATLSCRASQDIS |
| 1093 | Full-aa | KYLNWYQQKPGQAPRLLIYHTSRLHSGIPARFSGSGSGTDYTLTISSLQPE |
| | | DFAVYFCQQGNTLPYTFGQGTKLEIKGGGGSGGGGSGGGGSQVQLQESG |
| | | PGLVKPSETLSLTCTVSGVSLPDYGVSWIRQPPGKGLEWIGVIWGSETTYY |
| | | NSSLKSRVTISKDNSKNQVSLKLSSVTAADTAVYYCAKHYYYGGSYAMD |
| | | YWGQGTLVTVSSTTTPAPRPPTPAPTIASQPLSLRPEACRPAAGGAVHTRG |
| | | LDFACDIYIWAPLAGTCGVLLLSLVITLYCKRGRKKLLYIFKQPFMRPVQT |
| | | TQEEDGCSCRFPEEEEGGCELRVKFSRSADAPAYKQGQNQLYNELNLGRR |
| | | EEYDVLDKRRGRDPEMGGKPRRKNPQEGLYNELQKDKMAEAYSEIGMK |
| | | GERRRGKGHDGLYQGLSTATKDTYDALHMQALPPR |
| Murine | | |
| CART19 | | |
| SEQ ID NO: | HCDR1 | DYGVS |
| 1094 | (Kabat) | |
| SEQ ID NO: | HCDR2 | VIWGSETTYYNSALKS |
| 1095 | (Kabat) | |
| SEQ ID NO: | HCDR3 | HYYYGGSYAMDY |
| 1096 | (Kabat) | |
| SEQ ID NO: | LCDR1 | RASQDISKYLN |
| 1097 | (Kabat) | |
| SEQ ID NO: | LCDR2 | HTSRLHS |
| 1098 | (Kabat) | |
| SEQ ID NO: | LCDR3 | QQGNTLPYT |
| 1099 | (Kabat) | |
| Humanized | | |
| CART19 a | | |
| SEQ ID NO: | HCDR1 | DYGVS |
| 1100 | (Kabat) | |
| SEQ ID NO: | HCDR2 | VIWGSETTYYSSSLKS |
| 1101 | (Kabat) | |
| SEQ ID NO: | HCDR3 | HYYYGGSYAMDY |
| 1102 | (Kabat) | |
| SEQ ID NO: | LCDR1 | RASQDISKYLN |
| 1103 | (Kabat) | |
| SEQ ID NO: | LCDR2 | HTSRLHS |
| 1104 | (Kabat) | |
| SEQ ID NO: | LCDR3 | QQGNTLPYT |
| 1105 | (Kabat) | |
| Humanized | | |
| CART19 b | | |
| SEQ ID NO: | HCDR1 | DYGVS |
| 1106 | (Kabat) | |
| SEQ ID NO: | HCDR2 | VIWGSETTYYQSSLKS |
| 1107 | (Kabat) | |
| SEQ ID NO: | HCDR3 | HYYYGGSYAMDY |
| 1108 | (Kabat) | |
| SEQ ID NO: | LCDR1 | RASQDISKYLN |
| 1109 | (Kabat) | |
| SEQ ID NO: | LCDR2 | HTSRLHS |
| 1110 | (Kabat) | |
| SEQ ID NO: | LCDR3 | QQGNTLPYT |
| 1111 | (Kabat) | |
| Humanized | | |
| CART19 c | | |
| SEQ ID NO: | HCDR1 | DYGVS |
| 1112 | (Kabat) | |
| SEQ ID NO: | HCDR2 | VIWGSETTYYNSSLKS |
| 1113 | (Kabat) | |
| SEQ ID NO: | HCDR3 | HYYYGGSYAMDY |
| 1114 | (Kabat) | |
| SEQ ID NO: | LCDR1 | RASQDISKYLN |
| 1115 | (Kabat) | |
| SEQ ID NO: | LCDR2 | HTSRLHS |
| 1116 | (Kabat) | |
| SEQ ID NO: | LCDR3 | QQGNTLPYT |
| 1117 | (Kabat) | |

[0273] CD19 CAR constructs containing humanized anti-CD19 scFv domains are described in PCT publication WO 2014/153270, incorporated herein by reference.

[0274] The sequences of murine and humanized CDR sequences of the anti-CD19 scFv domains are shown in Table 12 for the heavy chain variable domains and in Table 13 for the light chain variable domains. The SEQ ID NOs refer to those found in Table 11.

TABLE 12
Heavy Chain Variable Domain CDR (Kabat)
SEQ ID NO's of CD19 Antibodies

| Candidate | HCDR1 | HCDR2 | HCDR3 |
|---|---|---|---|
| murine_CART19 | SEQ ID NO: | SEQ ID NO: | SEQ ID NO: 1096 |
| | 1094 | 1095 | |
| humanized_CART19 a | SEQ ID NO: | SEQ ID NO: | SEQ ID NO: 1102 |
| | 1100 | 1101 | |
| humanized_CART19 b | SEQ ID NO: | SEQ ID NO: | SEQ ID NO: 1108 |
| | 1106 | 1107 | |
| humanized_CART19 c | SEQ ID NO: | SEQ ID NO: | SEQ ID NO: 1114 |
| | 1112 | 1113 | |

TABLE 13
Light Chain Variable Domain CDR (Kabat)
SEQ ID NO's of CD19 Antibodies

| Candidate | LCDR1 | LCDR2 | LCDR3 |
|---|---|---|---|
| murine_CART19 | SEQ ID NO: | SEQ ID NO: | SEQ ID NO: 1099 |
| | 1097 | 1098 | |
| humanized_CART19 a | SEQ ID NO: | SEQ ID NO: | SEQ ID NO: 1105 |
| | 1103 | 1104 | |
| humanized_CART19 b | SEQ ID NO: | SEQ ID NO: | SEQ ID NO: 1111 |
| | 1109 | 1110 | |
| humanized_CART19 c | SEQ ID NO: | SEQ ID NO: | SEQ ID NO: 1117 |
| | 1115 | 1116 | |

[0275] Any known CD19 CAR, e.g., the CD19 antigen binding domain of any known CD19 CAR, in the art can be used in accordance with the present disclosure. For example, LG-740; CD19 CAR described in the U.S. Pat. Nos. 8,399,645; 7,446,190; Xu et al., Leuk Lymphoma. 2013 54(2):255-260(2012); Cruz et al., Blood 122(17):2965-2973 (2013); Brentjens et al., Blood, 118(18):4817-4828 (2011); Kochenderfer et al., Blood 116(20):4099-102 (2010); Kochenderfer et al., Blood 122 (25):4129-39(2013); and 16th Annu Meet Am Soc Gen Cell Ther (ASGCT) (May 15-18, Salt Lake City) 2013, Abst 10.

[0276] Exemplary CD19 CARs include CD19 CARs described herein, e.g., in one or more tables described herein, or an anti-CD19 CAR described in Xu et al. Blood 123.24(2014):3750-9; Kochenderfer et al. Blood 122.25(2013):4129-39, Cruz et al. Blood 122.17(2013):2965-73, NCT00586391, NCT01087294, NCT02456350, NCT00840853, NCT02659943, NCT02650999, NCT02640209, NCT01747486, NCT02546739, NCT02656147, NCT02772198, NCT00709033, NCT02081937, NCT00924326, NCT02735083, NCT02794246, NCT02746952, NCT01593696, NCT02134262, NCT01853631, NCT02443831, NCT02277522, NCT02348216, NCT02614066, NCT02030834, NCT02624258, NCT02625480, NCT02030847, NCT02644655, NCT02349698, NCT02813837, NCT02050347, NCT01683279, NCT02529813, NCT02537977, NCT02799550, NCT02672501, NCT02819583, NCT02028455, NCT01840566, NCT01318317, NCT01864889, NCT02706405, NCT01475058, NCT01430390, NCT02146924, NCT02051257, NCT02431988, NCT01815749, NCT02153580, NCT01865617, NCT02208362, NCT02685670, NCT02535364, NCT02631044, NCT02728882, NCT02735291, NCT01860937, NCT02822326, NCT02737085, NCT02465983, NCT02132624, NCT02782351, NCT01493453, NCT02652910, NCT02247609, NCT01029366, NCT01626495, NCT02721407, NCT01044069, NCT00422383, NCT01680991, NCT02794961, or NCT02456207, each of which is incorporated herein by reference in its entirety.

### BCMA CAR and BCMA-Binding Sequences

[0277] In some embodiments, the CAR IL-15R/IL-15-expressing cell described herein is a BCMA CAR-expressing cell (e.g., a cell expressing a CAR that binds to human BCMA). Exemplary BCMA CARs can include sequences disclosed in Table 1 or 16 of WO2016/014565, incorporated herein by reference. The BCMA CAR construct can include an optional leader sequence; an optional hinge domain, e.g., a CD8 hinge domain; a transmembrane domain, e.g., a CD8 transmembrane domain; an intracellular domain, e.g., a 4-1BB intracellular domain; and a functional signaling domain, e.g., a CD3 zeta domain. In certain embodiments, the domains are contiguous and in the same reading frame to form a single fusion protein. In other embodiments, the domain are in separate polypeptides, e.g., as in an RCAR molecule as described herein.

[0278] The sequences of exemplary BCMA CAR molecules or fragments thereof are disclosed in Tables 14, 15, 16, and 17. In certain embodiments, the full length BCMA CAR molecule includes one or more CDRs, VH, VL, scFv, or full-length sequences of, BCMA-1, BCMA-2, BCMA-3, BCMA-4, BCMA-5, BCMA-6, BCMA-7, BCMA-8, BCMA-9, BCMA-10, BCMA-11, BCMA-12, BCMA-13, BCMA-14, BCMA-15, 149362, 149363, 149364, 149365, 149366, 149367, 149368, 149369, BCMA_EBB-C1978-A4, BCMA_EBB-C1978-G1, BCMA_EBB-C1979-C1, BCMA_EBB-C1978-C7, BCMA_EBB-C1978-D10, BCMA_EBB-C1979-C12, BCMA_EBB-C1980-G4, BCMA_EBB-C1980-D2, BCMA_EBB-C1978-A10, BCMA_EBB-C1978-D4, BCMA_EBB-C1980-A2, BCMA_EBB-C1981-C3, BCMA_EBB-C1978-G4, A7D12.2, C11D5.3, C12A3.2, or C13F12.1, as disclosed in Tables U, V, W, and X, or a sequence substantially (e.g., 95-99%) identical thereto.

[0279] Additional exemplary BCMA-targeting sequences that can be used in the anti-BCMA CAR constructs are disclosed in WO 2017/021450, WO 2017/011804, WO 2017/025038, WO 2016/090327, WO 2016/130598, WO 2016/210293, WO 2016/090320, WO 2016/014789, WO 2016/094304, WO 2016/154055, WO 2015/166073, WO 2015/188119, WO 2015/158671, U.S. Pat. Nos. 9,243,058, 8,920,776, 9,273,141, 7,083,785, 9,034,324, US 2007/0049735, US 2015/0284467, US 2015/0051266, US 2015/0344844, US 2016/0131655, US 2016/0297884, US 2016/0297885, US 2017/0051308, US 2017/0051252, US 2017/0051252, WO 2016/020332, WO 2016/087531, WO 2016/079177, WO 2015/172800, WO 2017/008169, U.S. Pat. No. 9,340,621, US 2013/0273055, US 2016/0176973, US 2015/0368351, US 2017/0051068, US 2016/0368988, and US 2015/0232557, herein incorporated by reference in their entirety. In some embodiments, additional exemplary BCMA CAR constructs are generated using the VH and VL sequences from PCT Publication WO2012/0163805 (the contents of which are hereby incorporated by reference in its entirety).

TABLE 14
Amino Acid and Nucleic Acid Sequences of exemplary anti-BCMA scFv domains and
BCMA CAR molecules. The amino acid sequences variable heavy chain and variable
light chain sequences for each scFv is also provided.

| | SEQ | |
|---|---|---|
| Name/ | ID | |
| Description | NO: | Sequence |
| 139109 | | |
| 139109-aa | 49 | EVQLVESGGGLVQPGGSLRLSCAVSGFALSNHGMSWVRRAPGKGLEWVSGIVYSGSTY |
| ScFv domain | | YAASVKGRFTISRDNSRNTLYLQMNSLRPEDTAIYYCSAHGGESDVWGQGTTVTVSSA |
| | | SGGGGSGGRASGGGGSDIQLTQSPSSLSASVGDRVTITCRASQSISSYLNWYQQKPGK |
| | | APKLLIYAASSLQSGVPSRFSGSGSGTDFTLTISSLQPEDFATYYCQQSYSTPYTFGQ |
| | | GTKVEIK |
| 139109-nt | 64 | GAAGTGCAATTGGTGGAATCAGGGGGAGGACTTGTGCAGCCTGGAGGATCGCTGAGAC |
| ScFv domain | | TGTCATGTGCCGTGTCCGGCTTTGCCCTGTCCAACCACGGGATGTCCTGGGTCCGCCG |
| | | CGCGCCTGGAAAGGGCCTCGAATGGGTGTCGGGTATTGTGTACAGCGGTAGCACCTAC |
| | | TATGCCGCATCCGTGAAGGGGAGATTCACCATCAGCCGGGACAACTCCAGGAACACTC |
| | | TGTACCTCCAAATGAATTCGCTGAGGCCAGAGGACACTGCCATCTACTACTGCTCCGC |
| | | GCATGGCGGAGAGTCCGACGTCTGGGGACAGGGGACCACCGTGACCGTGTCTAGCGCG |
| | | TCCGGCGGAGGCGGCAGCGGGGGTCGGGCATCAGGGGGCGGCGGATCGGACATCCAGC |
| | | TCACCCAGTCCCCGAGCTCGCTGTCCGCCTCCGTGGGAGATCGGGTCACCATCACGTG |
| | | CCGCGCCAGCCAGTCGATTTCCTCCTACCTGAACTGGTACCAACAGAAGCCCGGAAAA |
| | | GCCCCGAAGCTTCTCATCTACGCCGCCTCGAGCCTGCAGTCAGGAGTGCCCTCACGGT |
| | | TCTCCGGCTCCGGTTCCGGTACTGATTTCACCCTGACCATTTCCTCCCTGCAACCGGA |
| | | GGACTTCGCTACTTACTACTGCCAGCAGTCGTACTCCACCCCCTACACTTTCGGACAA |
| | | GGCACCAAGGTCGAAATCAAG |
| 139109-aa | 79 | EVQLVESGGGLVQPGGSLRLSCAVSGFALSNHGMSWVRRAPGKGLEWVSGIVYSGSTY |
| VH | | YAASVKGRFTISRDNSRNTLYLQMNSLRPEDTAIYYCSAHGGESDVWGQGTTVTVSS |
| 139109-aa | 94 | DIQLTQSPSSLSASVGDRVTITCRASQSISSYLNWYQQKPGKAPKLLIYAASSLQSGV |
| VL | | PSRFSGSGSGTDFTLTISSLQPEDFATYYCQQSYSTPYTFGQGTKVEIK |
| 139109-aa | 109 | MALPVTALLLPLALLLHAARPEVQLVESGGGLVQPGGSLRLSCAVSGFALSNHGMSWV |
| Full CAR | | RRAPGKGLEWVSGIVYSGSTYYAASVKGRFTISRDNSRNTLYLQMNSLRPEDTAIYYC |
| | | SAHGGESDVWGQGTTVTVSSASGGGGSGGRASGGGGSDIQLTQSPSSLSASVGDRVTI |
| | | TCRASQSISSYLNWYQQKPGKAPKLLIYAASSLQSGVPSRFSGSGSGTDFTLTISSLQ |
| | | PEDFATYYCQQSYSTPYTFGQGTKVEIKTTTPAPRPPTPAPTIASQPLSLRPEACRPA |
| | | AGGAVHTRGLDFACDIYIWAPLAGTCGVLLLSLVITLYCKRGRKKLLYIFKQPFMRPV |
| | | QTTQEEDGCSCRFPEEEEGGCELRVKFSRSADAPAYKQGQNQLYNELNLGRREEYDVL |
| | | DKRRGRDPEMGGKPRRKNPQEGLYNELQKDKMAEAYSEIGMKGERRRGKGHDGLYQGL |
| | | STATKDTYDALHMQALPPR |
| 139109-nt | 124 | ATGGCCCTCCCTGTCACCGCCCTGCTGCTTCCGCTGGCTCTTCTGCTCCACGCCGCTC |
| Full CAR | | GGCCCGAAGTGCAATTGGTGGAATCAGGGGGAGGACTTGTGCAGCCTGGAGGATCGCT |
| | | GAGACTGTCATGTGCCGTGTCCGGCTTTGCCCTGTCCAACCACGGGATGTCCTGGGTC |
| | | CGCCGCGCGCCTGGAAAGGGCCTCGAATGGGTGTCGGGTATTGTGTACAGCGGTAGCA |
| | | CCTACTATGCCGCATCCGTGAAGGGGAGATTCACCATCAGCCGGGACAACTCCAGGAA |
| | | CACTCTGTACCTCCAAATGAATTCGCTGAGGCCAGAGGACACTGCCATCTACTACTGC |
| | | TCCGCGCATGGCGGAGAGTCCGACGTCTGGGGACAGGGGACCACCGTGACCGTGTCTA |
| | | GCGCGTCCGGCGGAGGCGGCAGCGGGGGTCGGGCATCAGGGGGCGGCGGATCGGACAT |
| | | CCAGCTCACCCAGTCCCCGAGCTCGCTGTCCGCCTCCGTGGGAGATCGGGTCACCATC |
| | | ACGTGCCGCGCCAGCCAGTCGATTTCCTCCTACCTGAACTGGTACCAACAGAAGCCCG |
| | | GAAAAGCCCCGAAGCTTCTCATCTACGCCGCCTCGAGCCTGCAGTCAGGAGTGCCCTC |
| | | ACGGTTCTCCGGCTCCGGTTCCGGTACTGATTTCACCCTGACCATTTCCTCCCTGCAA |
| | | CCGGAGGACTTCGCTACTTACTACTGCCAGCAGTCGTACTCCACCCCCTACACTTTCG |
| | | GACAAGGCACCAAGGTCGAAATCAAGACCACTACCCCAGCACCGAGGCCACCCACCCC |
| | | GGCTCCTACCATCGCCTCCCAGCCTCTGTCCCTGCGTCCGGAGGCATGTAGACCCGCA |
| | | GCTGGTGGGGCCGTGCATACCCGGGGTCTTGACTTCGCCTGCGATATCTACATTTGGG |
| | | CCCCTCTGGCTGGTACTTGCGGGGTCCTGCTGCTTTCACTCGTGATCACTCTTTACTG |
| | | TAAGCGCGGTCGGAAGAAGCTGCTGTACATCTTTAAGCAACCCTTCATGAGGCCTGTG |
| | | CAGACTACTCAAGAGGAGGACGGCTGTTCATGCCGGTTCCCAGAGGAGGAGGAAGGCG |
| | | GCTGCGAACTGCGCGTGAAATTCAGCCGCAGCGCAGATGCTCCAGCCTACAAGCAGGG |
| | | GCAGAACCAGCTCTACAACGAACTCAATCTTGGTCGGAGAGAGGAGTACGACGTGCTG |
| | | GACAAGCGGAGAGGACGGGACCCAGAAATGGGCGGGAAGCCGCGCAGAAAGAATCCCC |
| | | AAGAGGGCCTGTACAACGAGCTCCAAAAGGATAAGATGGCAGAAGCCTATAGCGAGAT |
| | | TGGTATGAAAGGGGAACGCAGAAGAGGCAAAGGCCACGACGGACTGTACCAGGGACTC |
| | | AGCACCGCCACCAAGGACACCTATGACGCTCTTCACATGCAGGCCCTGCCGCCTCGG |
| Full CAR | 392 | EVQLVESGGGLVQPGGSLRLSCAVSGFALSNHGMSWVRRAPGKGLEWVSGIVYSGSTY |
| without leader | | YAASVKGRFTISRDNSRNTLYLQMNSLRPEDTAIYYCSAHGGESDVWGQGTTVTVSSA |
| sequence | | SGGGGSGGRASGGGGSDIQLTQSPSSLSASVGDRVTITCRASQSISSYLNWYQQKPGK |
| | | APKLLIYAASSLQSGVPSRFSGSGSGTDFTLTISSLQPEDFATYYCQQSYSTPYTFGQ |
| | | GTKVEIKTTTPAPRPPTPAPTIASQPLSLRPEACRPAAGGAVHTRGLDFACDIYIWAP |
| | | LAGTCGVLLLSLVITLYCKRGRKKLLYIFKQPFMRPVQTTQEEDGCSCRFPEEEEGGC |
| | | ELRVKFSRSADAPAYKQGQNQLYNELNLGRREEYDVLDKRRGRDPEMGGKPRRKNPQE |
| | | GLYNELQKDKMAEAYSEIGMKGERRRGKGHDGLYQGLSTATKDTYDALHMQALPPR |
| Full CAR | 393 | EVQLVESGGGLVQPGGSLRLSCAVSGFALSNHGMSWVRRAPGKGLEWVSGIVYSGSTY |
| without linker, | | YAASVKGRFTISRDNSRNTLYLQMNSLRPEDTAIYYCSAHGGESDVWGQGTTVTVSSD |
| without leader | | IQLTQSPSSLSASVGDRVTITCRASQSISSYLNWYQQKPGKAPKLLIYAASSLQSGVP |
| sequence | | SRFSGSGSGTDFTLTISSLQPEDFATYYCQQSYSTPYTFGQGTKVEIKTTTPAPRPPT |
| | | PAPTIASQPLSLRPEACRPAAGGAVHTRGLDFACDIYIWAPLAGTCGVLLLSLVITLY |
| | | CKRGRKKLLYIFKQPFMRPVQTTQEEDGCSCRFPEEEEGGCELRVKFSRSADAPAYKQ |
| | | GQNQLYNELNLGRREEYDVLDKRRGRDPEMGGKPRRKNPQEGLYNELQKDKMAEAYSE |
| | | IGMKGERRRGKGHDGLYQGLSTATKDTYDALHMQALPPR |
| 139103 | | |
| 139103-aa | 39 | QVQLVESGGGLVQPGRSLRLSCAASGFTFSNYAMSWVRQAPGKGLGWVSGISRSGENT |
| ScFv domain | | YYADSVKGRFTISRDNSKNTLYLQMNSLRDEDTAVYYCARSPAHYYGGMDVWGQGTTV |
| | | TVSSASGGGGSGGRASGGGGSDIVLTQSPGTLSLSPGERATLSCRASQSISSSFLAWY |
| | | QQKPGQAPRLLIYGASRRATGIPDRFSGSGSGTDFTLTISRLEPEDSAVYYCQQYHSS |
| | | PSWTFGQGTKLEIK |
| 139103-nt | 54 | CAAGTGCAACTCGTGGAATCTGGTGGAGGACTCGTGCAACCCGGAAGATCGCTTAGAC |
| ScFv domain | | TGTCGTGTGCCGCCAGCGGGTTCACTTTCTCGAACTACGCGATGTCCTGGGTCCGCCA |
| | | GGCACCCGGAAAGGGACTCGGTTGGGTGTCCGGCATTTCCCGGTCCGGCGAAAATACC |
| | | TACTACGCCGACTCCGTGAAGGGCCGCTTCACCATCTCAAGGGACAACAGCAAAAACA |
| | | CCCTGTACTTGCAAATGAACTCCCTGCGGGATGAAGATACAGCCGTGTACTATTGCGC |
| | | CCGGTCGCCTGCCCATTACTACGGCGGAATGGACGTCTGGGGACAGGGAACCACTGTG |
| | | ACTGTCAGCAGCGCGTCGGGTGGCGGCGGCTCAGGGGGTCGGGCCTCCGGGGGGGGAG |
| | | GGTCCGACATCGTGCTGACCCAGTCCCCGGGAACCCTGAGCCTGAGCCCGGGAGAGCG |
| | | CGCGACCCTGTCATGCCGGGCATCCCAGAGCATTAGCTCCTCCTTTCTCGCCTGGTAT |
| | | CAGCAGAAGCCCGGACAGGCCCCGAGGCTGCTGATCTACGGCGCTAGCAGAAGGGCTA |
| | | CCGGAATCCCAGACCGGTTCTCCGGCTCCGGTTCCGGGACCGATTTCACCCTTACTAT |
| | | CTCGCGCCTGGAACCTGAGGACTCCGCCGTCTACTACTGCCAGCAGTACCACTCATCC |
| | | CCGTCGTGGACGTTCGGACAGGGCACCAAGCTGGAGATTAAG |
| 139103-aa | 69 | QVQLVESGGGLVQPGRSLRLSCAASGFTFSNYAMSWVRQAPGKGLGWVSGISRSGENT |
| VH | | YYADSVKGRFTISRDNSKNTLYLQMNSLRDEDTAVYYCARSPAHYYGGMDVWGQGTTV |
| | | TVSS |
| 139103-aa | 84 | DIVLTQSPGTLSLSPGERATLSCRASQSISSSFLAWYQQKPGQAPRLLIYGASRRATG |
| VL | | IPDRFSGSGSGTDFTLTISRLEPEDSAVYYCQQYHSSPSWTFGQGTKLEIK |
| 139103-aa | 99 | MALPVTALLLPLALLLHAARPQVQLVESGGGLVQPGRSLRLSCAASGFTFSNYAMSWV |
| Full CAR | | RQAPGKGLGWVSGISRSGENTYYADSVKGRFTISRDNSKNTLYLQMNSLRDEDTAVYY |
| | | CARSPAHYYGGMDVWGQGTTVTVSSASGGGGSGGRASGGGGSDIVLTQSPGTLSLSPG |
| | | ERATLSCRASQSISSSFLAWYQQKPGQAPRLLIYGASRRATGIPDRFSGSGSGTDFTL |
| | | TISRLEPEDSAVYYCQQYHSSPSWTFGQGTKLEIKTTTPAPRPPTPAPTIASQPLSLR |
| | | PEACRPAAGGAVHTRGLDFACDIYIWAPLAGTCGVLLLSLVITLYCKRGRKKLLYIFK |
| | | QPFMRPVQTTQEEDGCSCRFPEEEEGGCELRVKFSRSADAPAYKQGQNQLYNELNLGR |
| | | REEYDVLDKRRGRDPEMGGKPRRKNPQEGLYNELQKDKMAEAYSEIGMKGERRRGKGH |
| | | DGLYQGLSTATKDTYDALHMQALPPR |
| 139103-nt | 114 | ATGGCCCTCCCTGTCACCGCCCTGCTGCTTCCGCTGGCTCTTCTGCTCCACGCCGCTC |
| Full CAR | | GGCCCCAAGTGCAACTCGTGGAATCTGGTGGAGGACTCGTGCAACCCGGAAGATCGCT |
| | | TAGACTGTCGTGTGCCGCCAGCGGGTTCACTTTCTCGAACTACGCGATGTCCTGGGTC |
| | | CGCCAGGCACCCGGAAAGGGACTCGGTTGGGTGTCCGGCATTTCCCGGTCCGGCGAAA |
| | | ATACCTACTACGCCGACTCCGTGAAGGGCCGCTTCACCATCTCAAGGGACAACAGCAA |
| | | AAACACCCTGTACTTGCAAATGAACTCCCTGCGGGATGAAGATACAGCCGTGTACTAT |
| | | TGCGCCCGGTCGCCTGCCCATTACTACGGCGGAATGGACGTCTGGGGACAGGGAACCA |
| | | CTGTGACTGTCAGCAGCGCGTCGGGTGGCGGCGGCTCAGGGGGTCGGGCCTCCGGGGG |
| | | GGGAGGGTCCGACATCGTGCTGACCCAGTCCCCGGGAACCCTGAGCCTGAGCCCGGGA |
| | | GAGCGCGCGACCCTGTCATGCCGGGCATCCCAGAGCATTAGCTCCTCCTTTCTCGCCT |
| | | GGTATCAGCAGAAGCCCGGACAGGCCCCGAGGCTGCTGATCTACGGCGCTAGCAGAAG |
| | | GGCTACCGGAATCCCAGACCGGTTCTCCGGCTCCGGTTCCGGGACCGATTTCACCCTT |
| | | ACTATCTCGCGCCTGGAACCTGAGGACTCCGCCGTCTACTACTGCCAGCAGTACCACT |
| | | CATCCCCGTCGTGGACGTTCGGACAGGGCACCAAGCTGGAGATTAAGACCACTACCCC |
| | | AGCACCGAGGCCACCCACCCCGGCTCCTACCATCGCCTCCCAGCCTCTGTCCCTGCGT |
| | | CCGGAGGCATGTAGACCCGCAGCTGGTGGGGCCGTGCATACCCGGGGTCTTGACTTCG |
| | | CCTGCGATATCTACATTTGGGCCCCTCTGGCTGGTACTTGCGGGGTCCTGCTGCTTTC |
| | | ACTCGTGATCACTCTTTACTGTAAGCGCGGTCGGAAGAAGCTGCTGTACATCTTTAAG |
| | | CAACCCTTCATGAGGCCTGTGCAGACTACTCAAGAGGAGGACGGCTGTTCATGCCGGT |
| | | TCCCAGAGGAGGAGGAAGGCGGCTGCGAACTGCGCGTGAAATTCAGCCGCAGCGCAGA |
| | | TGCTCCAGCCTACAAGCAGGGGCAGAACCAGCTCTACAACGAACTCAATCTTGGTCGG |
| | | AGAGAGGAGTACGACGTGCTGGACAAGCGGAGAGGACGGGACCCAGAAATGGGCGGGA |
| | | AGCCGCGCAGAAAGAATCCCCAAGAGGGCCTGTACAACGAGCTCCAAAAGGATAAGAT |
| | | GGCAGAAGCCTATAGCGAGATTGGTATGAAAGGGGAACGCAGAAGAGGCAAAGGCCAC |
| | | GACGGACTGTACCAGGGACTCAGCACCGCCACCAAGGACACCTATGACGCTCTTCACA |
| | | TGCAGGCCCTGCCGCCTCGG |
| 139105 | | |
| 139105-aa | 40 | QVQLVESGGGLVQPGRSLRLSCAASGFTFDDYAMHWVRQAPGKGLEWVSGISWNSGSI |
| ScFv domain | | GYADSVKGRFTISRDNAKNSLYLQMNSLRAEDTALYYCSVHSFLAYWGQGTLVTVSSA |
| | | SGGGGSGGRASGGGGSDIVMTQTPLSLPVTPGEPASISCRSSQSLLHSNGYNYLDWYL |
| | | QKPGQSPQLLIYLGSNRASGVPDRFSGSGSGTDFTLKISRVEAEDVGVYYCMQALQTP |
| | | YTFGQGTKVEIK |
| 139105-nt | 55 | CAAGTGCAACTCGTCGAATCCGGTGGAGGTCTGGTCCAACCTGGTAGAAGCCTGAGAC |
| ScFv domain | | TGTCGTGTGCGGCCAGCGGATTCACCTTTGATGACTATGCTATGCACTGGGTGCGGCA |
| | | GGCCCCAGGAAAGGGCCTGGAATGGGTGTCGGGAATTAGCTGGAACTCCGGGTCCATT |
| | | GGCTACGCCGACTCCGTGAAGGGCCGCTTCACCATCTCCCGCGACAACGCAAAGAACT |
| | | CCCTGTACTTGCAAATGAACTCGCTCAGGGCTGAGGATACCGCGCTGTACTACTGCTC |
| | | CGTGCATTCCTTCCTGGCCTACTGGGGACAGGGAACTCTGGTCACCGTGTCGAGCGCC |
| | | TCCGGCGGCGGGGGCTCGGGTGGACGGGCCTCGGGCGGAGGGGGGTCCGACATCGTGA |
| | | TGACCCAGACCCCGCTGAGCTTGCCCGTGACTCCCGGAGAGCCTGCATCCATCTCCTG |
| | | CCGGTCATCCCAGTCCCTTCTCCACTCCAACGGATACAACTACCTCGACTGGTACCTC |
| | | CAGAAGCCGGGACAGAGCCCTCAGCTTCTGATCTACCTGGGGTCAAATAGAGCCTCAG |
| | | GAGTGCCGGATCGGTTCAGCGGATCTGGTTCGGGAACTGATTTCACTCTGAAGATTTC |
| | | CCGCGTGGAAGCCGAGGACGTGGGCGTCTACTACTGTATGCAGGCGCTGCAGACCCCC |
| | | TATACCTTCGGCCAAGGGACGAAAGTGGAGATCAAG |
| 139105-aa | 70 | QVQLVESGGGLVQPGRSLRLSCAASGFTFDDYAMHWVRQAPGKGLEWVSGISWNSGSI |
| VH | | GYADSVKGRFTISRDNAKNSLYLQMNSLRAEDTALYYCSVHSFLAYWGQGTLVTVSS |
| 139105-aa | 85 | DIVMTQTPLSLPVTPGEPASISCRSSQSLLHSNGYNYLDWYLQKPGQSPQLLIYLGSN |
| VL | | RASGVPDRFSGSGSGTDFTLKISRVEAEDVGVYYCMQALQTPYTFGQGTKVEIK |
| 139105-aa | 100 | MALPVTALLLPLALLLHAARPQVQLVESGGGLVQPGRSLRLSCAASGFTFDDYAMHWV |
| Full CAR | | RQAPGKGLEWVSGISWNSGSIGYADSVKGRFTISRDNAKNSLYLQMNSLRAEDTALYY |
| | | CSVHSFLAYWGQGTLVTVSSASGGGGSGGRASGGGGSDIVMTQTPLSLPVTPGEPASI |
| | | SCRSSQSLLHSNGYNYLDWYLQKPGQSPQLLIYLGSNRASGVPDRFSGSGSGTDFTLK |
| | | ISRVEAEDVGVYYCMQALQTPYTFGQGTKVEIKTTTPAPRPPTPAPTIASQPLSLRPE |
| | | ACRPAAGGAVHTRGLDFACDIYIWAPLAGTCGVLLLSLVITLYCKRGRKKLLYIFKQP |
| | | FMRPVQTTQEEDGCSCRFPEEEEGGCELRVKFSRSADAPAYKQGQNQLYNELNLGRRE |
| | | EYDVLDKRRGRDPEMGGKPRRKNPQEGLYNELQKDKMAEAYSEIGMKGERRRGKGHDG |
| | | LYQGLSTATKDTYDALHMQALPPR |
| 139105-nt | 115 | ATGGCCCTCCCTGTCACCGCCCTGCTGCTTCCGCTGGCTCTTCTGCTCCACGCCGCTC |
| Full CAR | | GGCCCCAAGTGCAACTCGTCGAATCCGGTGGAGGTCTGGTCCAACCTGGTAGAAGCCT |
| | | GAGACTGTCGTGTGCGGCCAGCGGATTCACCTTTGATGACTATGCTATGCACTGGGTG |
| | | CGGCAGGCCCCAGGAAAGGGCCTGGAATGGGTGTCGGGAATTAGCTGGAACTCCGGGT |
| | | CCATTGGCTACGCCGACTCCGTGAAGGGCCGCTTCACCATCTCCCGCGACAACGCAAA |
| | | GAACTCCCTGTACTTGCAAATGAACTCGCTCAGGGCTGAGGATACCGCGCTGTACTAC |
| | | TGCTCCGTGCATTCCTTCCTGGCCTACTGGGGACAGGGAACTCTGGTCACCGTGTCGA |
| | | GCGCCTCCGGCGGCGGGGGCTCGGGTGGACGGGCCTCGGGCGGAGGGGGGTCCGACAT |
| | | CGTGATGACCCAGACCCCGCTGAGCTTGCCCGTGACTCCCGGAGAGCCTGCATCCATC |
| | | TCCTGCCGGTCATCCCAGTCCCTTCTCCACTCCAACGGATACAACTACCTCGACTGGT |
| | | ACCTCCAGAAGCCGGGACAGAGCCCTCAGCTTCTGATCTACCTGGGGTCAAATAGAGC |
| | | CTCAGGAGTGCCGGATCGGTTCAGCGGATCTGGTTCGGGAACTGATTTCACTCTGAAG |
| | | ATTTCCCGCGTGGAAGCCGAGGACGTGGGCGTCTACTACTGTATGCAGGCGCTGCAGA |
| | | CCCCCTATACCTTCGGCCAAGGGACGAAAGTGGAGATCAAGACCACTACCCCAGCACC |
| | | GAGGCCACCCACCCCGGCTCCTACCATCGCCTCCCAGCCTCTGTCCCTGCGTCCGGAG |
| | | GCATGTAGACCCGCAGCTGGTGGGGCCGTGCATACCCGGGGTCTTGACTTCGCCTGCG |
| | | ATATCTACATTTGGGCCCCTCTGGCTGGTACTTGCGGGGTCCTGCTGCTTTCACTCGT |
| | | GATCACTCTTTACTGTAAGCGCGGTCGGAAGAAGCTGCTGTACATCTTTAAGCAACCC |
| | | TTCATGAGGCCTGTGCAGACTACTCAAGAGGAGGACGGCTGTTCATGCCGGTTCCCAG |
| | | AGGAGGAGGAAGGCGGCTGCGAACTGCGCGTGAAATTCAGCCGCAGCGCAGATGCTCC |
| | | AGCCTACAAGCAGGGGCAGAACCAGCTCTACAACGAACTCAATCTTGGTCGGAGAGAG |
| | | GAGTACGACGTGCTGGACAAGCGGAGAGGACGGGACCCAGAAATGGGCGGGAAGCCGC |
| | | GCAGAAAGAATCCCCAAGAGGGCCTGTACAACGAGCTCCAAAAGGATAAGATGGCAGA |
| | | AGCCTATAGCGAGATTGGTATGAAAGGGGAACGCAGAAGAGGCAAAGGCCACGACGGA |
| | | CTGTACCAGGGACTCAGCACCGCCACCAAGGACACCTATGACGCTCTTCACATGCAGG |
| | | CCCTGCCGCCTCGG |
| 139111 | | |
| 139111-aa | 41 | EVQLLESGGGLVQPGGSLRLSCAVSGFALSNHGMSWVRRAPGKGLEWVSGIVYSGSTY |
| ScFv domain | | YAASVKGRFTISRDNSRNTLYLQMNSLRPEDTAIYYCSAHGGESDVWGQGTTVTVSSA |
| | | SGGGGSGGRASGGGGSDIVMTQTPLSLSVTPGQPASISCKSSQSLLRNDGKTPLYWYL |
| | | QKAGQPPQLLIYEVSNRFSGVPDRFSGSGSGTDFTLKISRVEAEDVGAYYCMQNIQFP |
| | | SFGGGTKLEIK |
| 139111-nt | 56 | GAAGTGCAATTGTTGGAATCTGGAGGAGGACTTGTGCAGCCTGGAGGATCACTGAGAC |
| ScFv domain | | TTTCGTGTGCGGTGTCAGGCTTCGCCCTGAGCAACCACGGCATGAGCTGGGTGCGGAG |
| | | AGCCCCGGGGAAGGGTCTGGAATGGGTGTCCGGGATCGTCTACTCCGGTTCAACTTAC |
| | | TACGCCGCAAGCGTGAAGGGTCGCTTCACCATTTCCCGCGATAACTCCCGGAACACCC |
| | | TGTACCTCCAAATGAACTCCCTGCGGCCCGAGGACACCGCCATCTACTACTGTTCCGC |
| | | GCATGGAGGAGAGTCCGATGTCTGGGGACAGGGCACTACCGTGACCGTGTCGAGCGCC |
| | | TCGGGGGGAGGAGGCTCCGGCGGTCGCGCCTCCGGGGGGGGTGGCAGCGACATTGTGA |
| | | TGACGCAGACTCCACTCTCGCTGTCCGTGACCCCGGGACAGCCCGCGTCCATCTCGTG |
| | | CAAGAGCTCCCAGAGCCTGCTGAGGAACGACGGAAAGACTCCTCTGTATTGGTACCTC |
| | | CAGAAGGCTGGACAGCCCCCGCAACTGCTCATCTACGAAGTGTCAAATCGCTTCTCCG |
| | | GGGTGCCGGATCGGTTTTCCGGCTCGGGATCGGGCACCGACTTCACCCTGAAAATCTC |
| | | CAGGGTCGAGGCCGAGGACGTGGGAGCCTACTACTGCATGCAAAACATCCAGTTCCCT |
| | | TCCTTCGGCGGCGGCACAAAGCTGGAGATTAAG |
| 139111-aa | 71 | EVQLLESGGGLVQPGGSLRLSCAVSGFALSNHGMSWVRRAPGKGLEWVSGIVYSGSTY |
| VH | | YAASVKGRFTISRDNSRNTLYLQMNSLRPEDTAIYYCSAHGGESDVWGQGTTVTVSS |
| 139111-aa | 86 | DIVMTQTPLSLSVTPGQPASISCKSSQSLLRNDGKTPLYWYLQKAGQPPQLLIYEVSN |
| VL | | RFSGVPDRFSGSGSGTDFTLKISRVEAEDVGAYYCMQNIQFPSFGGGTKLEIK |
| 139111-aa | 101 | MALPVTALLLPLALLLHAARPEVQLLESGGGLVQPGGSLRLSCAVSGFALSNHGMSWV |
| Full CAR | | RRAPGKGLEWVSGIVYSGSTYYAASVKGRFTISRDNSRNTLYLQMNSLRPEDTAIYYC |
| | | SAHGGESDVWGQGTTVTVSSASGGGGSGGRASGGGGSDIVMTQTPLSLSVTPGQPASI |
| | | SCKSSQSLLRNDGKTPLYWYLQKAGQPPQLLIYEVSNRFSGVPDRFSGSGSGTDFTLK |
| | | ISRVEAEDVGAYYCMQNIQFPSFGGGTKLEIKTTTPAPRPPTPAPTIASQPLSLRPEA |
| | | CRPAAGGAVHTRGLDFACDIYIWAPLAGTCGVLLLSLVITLYCKRGRKKLLYIFKQPF |
| | | MRPVQTTQEEDGCSCRFPEEEEGGCELRVKFSRSADAPAYKQGQNQLYNELNLGRREE |
| | | YDVLDKRRGRDPEMGGKPRRKNPQEGLYNELQKDKMAEAYSEIGMKGERRRGKGHDGL |
| | | YQGLSTATKDTYDALHMQALPPR |
| 139111-nt | 116 | ATGGCCCTCCCTGTCACCGCCCTGCTGCTTCCGCTGGCTCTTCTGCTCCACGCCGCTC |
| Full CAR | | GGCCCGAAGTGCAATTGTTGGAATCTGGAGGAGGACTTGTGCAGCCTGGAGGATCACT |
| | | GAGACTTTCGTGTGCGGTGTCAGGCTTCGCCCTGAGCAACCACGGCATGAGCTGGGTG |
| | | CGGAGAGCCCCGGGGAAGGGTCTGGAATGGGTGTCCGGGATCGTCTACTCCGGTTCAA |
| | | CTTACTACGCCGCAAGCGTGAAGGGTCGCTTCACCATTTCCCGCGATAACTCCCGGAA |
| | | CACCCTGTACCTCCAAATGAACTCCCTGCGGCCCGAGGACACCGCCATCTACTACTGT |
| | | TCCGCGCATGGAGGAGAGTCCGATGTCTGGGGACAGGGCACTACCGTGACCGTGTCGA |
| | | GCGCCTCGGGGGGAGGAGGCTCCGGCGGTCGCGCCTCCGGGGGGGGTGGCAGCGACAT |
| | | TGTGATGACGCAGACTCCACTCTCGCTGTCCGTGACCCCGGGACAGCCCGCGTCCATC |
| | | TCGTGCAAGAGCTCCCAGAGCCTGCTGAGGAACGACGGAAAGACTCCTCTGTATTGGT |
| | | ACCTCCAGAAGGCTGGACAGCCCCCGCAACTGCTCATCTACGAAGTGTCAAATCGCTT |
| | | CTCCGGGGTGCCGGATCGGTTTTCCGGCTCGGGATCGGGCACCGACTTCACCCTGAAA |
| | | ATCTCCAGGGTCGAGGCCGAGGACGTGGGAGCCTACTACTGCATGCAAAACATCCAGT |
| | | TCCCTTCCTTCGGCGGCGGCACAAAGCTGGAGATTAAGACCACTACCCCAGCACCGAG |
| | | GCCACCCACCCCGGCTCCTACCATCGCCTCCCAGCCTCTGTCCCTGCGTCCGGAGGCA |
| | | TGTAGACCCGCAGCTGGTGGGGCCGTGCATACCCGGGGTCTTGACTTCGCCTGCGATA |
| | | TCTACATTTGGGCCCCTCTGGCTGGTACTTGCGGGGTCCTGCTGCTTTCACTCGTGAT |
| | | CACTCTTTACTGTAAGCGCGGTCGGAAGAAGCTGCTGTACATCTTTAAGCAACCCTTC |
| | | ATGAGGCCTGTGCAGACTACTCAAGAGGAGGACGGCTGTTCATGCCGGTTCCCAGAGG |
| | | AGGAGGAAGGCGGCTGCGAACTGCGCGTGAAATTCAGCCGCAGCGCAGATGCTCCAGC |
| | | CTACAAGCAGGGGCAGAACCAGCTCTACAACGAACTCAATCTTGGTCGGAGAGAGGAG |
| | | TACGACGTGCTGGACAAGCGGAGAGGACGGGACCCAGAAATGGGCGGGAAGCCGCGCA |
| | | GAAAGAATCCCCAAGAGGGCCTGTACAACGAGCTCCAAAAGGATAAGATGGCAGAAGC |
| | | CTATAGCGAGATTGGTATGAAAGGGGAACGCAGAAGAGGCAAAGGCCACGACGGACTG |
| | | TACCAGGGACTCAGCACCGCCACCAAGGACACCTATGACGCTCTTCACATGCAGGCCC |
| | | TGCCGCCTCGG |
| 139100 | | |
| 139100-aa | 42 | QVQLVQSGAEVRKTGASVKVSCKASGYIFDNFGINWVRQAPGQGLEWMGWINPKNNNT |
| ScFv domain | | NYAQKFQGRVTITADESTNTAYMEVSSLRSEDTAVYYCARGPYYYQSYMDVWGQGTMV |
| | | TVSSASGGGGSGGRASGGGGSDIVMTQTPLSLPVTPGEPASISCRSSQSLLHSNGYNY |
| | | LNWYLQKPGQSPQLLIYLGSKRASGVPDRFSGSGSGTDFTLHITRVGAEDVGVYYCMQ |
| | | ALQTPYTFGQGTKLEIK |
| 139100-nt | 57 | CAAGTCCAACTCGTCCAGTCCGGCGCAGAAGTCAGAAAAACCGGTGCTAGCGTGAAAG |
| ScFv domain | | TGTCCTGCAAGGCCTCCGGCTACATTTTCGATAACTTCGGAATCAACTGGGTCAGACA |
| | | GGCCCCGGGCCAGGGGCTGGAATGGATGGGATGGATCAACCCCAAGAACAACAACACC |
| | | AACTACGCACAGAAGTTCCAGGGCCGCGTGACTATCACCGCCGATGAATCGACCAATA |
| | | CCGCCTACATGGAGGTGTCCTCCCTGCGGTCGGAGGACACTGCCGTGTATTACTGCGC |
| | | GAGGGGCCCATACTACTACCAAAGCTACATGGACGTCTGGGGACAGGGAACCATGGTG |
| | | ACCGTGTCATCCGCCTCCGGTGGTGGAGGCTCCGGGGGGCGGGCTTCAGGAGGCGGAG |
| | | GAAGCGATATTGTGATGACCCAGACTCCGCTTAGCCTGCCCGTGACTCCTGGAGAACC |
| | | GGCCTCCATTTCCTGCCGGTCCTCGCAATCACTCCTGCATTCCAACGGTTACAACTAC |
| | | CTGAATTGGTACCTCCAGAAGCCTGGCCAGTCGCCCCAGTTGCTGATCTATCTGGGCT |
| | | CGAAGCGCGCCTCCGGGGTGCCTGACCGGTTTAGCGGATCTGGGAGCGGCACGGACTT |
| | | CACTCTCCACATCACCCGCGTGGGAGCGGAGGACGTGGGAGTGTACTACTGTATGCAG |
| | | GCGCTGCAGACTCCGTACACATTCGGACAGGGCACCAAGCTGGAGATCAAG |
| 139100-aa | 72 | QVQLVQSGAEVRKTGASVKVSCKASGYIFDNFGINWVRQAPGQGLEWMGWINPKNNNT |
| VH | | NYAQKFQGRVTITADESTNTAYMEVSSLRSEDTAVYYCARGPYYYQSYMDVWGQGTMV |
| | | TVSS |
| 139100-aa | 87 | DIVMTQTPLSLPVTPGEPASISCRSSQSLLHSNGYNYLNWYLQKPGQSPQLLIYLGSK |
| VL | | RASGVPDRFSGSGSGTDFTLHITRVGAEDVGVYYCMQALQTPYTFGQGTKLEIK |
| 139100-aa | 102 | MALPVTALLLPLALLLHAARPQVQLVQSGAEVRKTGASVKVSCKASGYIFDNFGINWV |
| Full CAR | | RQAPGQGLEWMGWINPKNNNTNYAQKFQGRVTITADESTNTAYMEVSSLRSEDTAVYY |
| | | CARGPYYYQSYMDVWGQGTMVTVSSASGGGGSGGRASGGGGSDIVMTQTPLSLPVTPG |
| | | EPASISCRSSQSLLHSNGYNYLNWYLQKPGQSPQLLIYLGSKRASGVPDRFSGSGSGT |
| | | DFTLHITRVGAEDVGVYYCMQALQTPYTFGQGTKLEIKTTTPAPRPPTPAPTIASQPL |
| | | SLRPEACRPAAGGAVHTRGLDFACDIYIWAPLAGTCGVLLLSLVITLYCKRGRKKLLY |
| | | IFKQPFMRPVQTTQEEDGCSCRFPEEEEGGCELRVKFSRSADAPAYKQGQNQLYNELN |
| | | LGRREEYDVLDKRRGRDPEMGGKPRRKNPQEGLYNELQKDKMAEAYSEIGMKGERRRG |
| | | KGHDGLYQGLSTATKDTYDALHMQALPPR |
| 139100-nt | 117 | ATGGCCCTCCCTGTCACCGCCCTGCTGCTTCCGCTGGCTCTTCTGCTCCACGCCGCTC |
| Full CAR | | GGCCCCAAGTCCAACTCGTCCAGTCCGGCGCAGAAGTCAGAAAAACCGGTGCTAGCGT |
| | | GAAAGTGTCCTGCAAGGCCTCCGGCTACATTTTCGATAACTTCGGAATCAACTGGGTC |
| | | AGACAGGCCCCGGGCCAGGGGCTGGAATGGATGGGATGGATCAACCCCAAGAACAACA |
| | | ACACCAACTACGCACAGAAGTTCCAGGGCCGCGTGACTATCACCGCCGATGAATCGAC |
| | | CAATACCGCCTACATGGAGGTGTCCTCCCTGCGGTCGGAGGACACTGCCGTGTATTAC |
| | | TGCGCGAGGGGCCCATACTACTACCAAAGCTACATGGACGTCTGGGGACAGGGAACCA |
| | | TGGTGACCGTGTCATCCGCCTCCGGTGGTGGAGGCTCCGGGGGGCGGGCTTCAGGAGG |
| | | CGGAGGAAGCGATATTGTGATGACCCAGACTCCGCTTAGCCTGCCCGTGACTCCTGGA |
| | | GAACCGGCCTCCATTTCCTGCCGGTCCTCGCAATCACTCCTGCATTCCAACGGTTACA |
| | | ACTACCTGAATTGGTACCTCCAGAAGCCTGGCCAGTCGCCCCAGTTGCTGATCTATCT |
| | | GGGCTCGAAGCGCGCCTCCGGGGTGCCTGACCGGTTTAGCGGATCTGGGAGCGGCACG |
| | | GACTTCACTCTCCACATCACCCGCGTGGGAGCGGAGGACGTGGGAGTGTACTACTGTA |
| | | TGCAGGCGCTGCAGACTCCGTACACATTCGGACAGGGCACCAAGCTGGAGATCAAGAC |
| | | CACTACCCCAGCACCGAGGCCACCCACCCCGGCTCCTACCATCGCCTCCCAGCCTCTG |
| | | TCCCTGCGTCCGGAGGCATGTAGACCCGCAGCTGGTGGGGCCGTGCATACCCGGGGTC |
| | | TTGACTTCGCCTGCGATATCTACATTTGGGCCCCTCTGGCTGGTACTTGCGGGGTCCT |
| | | GCTGCTTTCACTCGTGATCACTCTTTACTGTAAGCGCGGTCGGAAGAAGCTGCTGTAC |
| | | ATCTTTAAGCAACCCTTCATGAGGCCTGTGCAGACTACTCAAGAGGAGGACGGCTGTT |
| | | CATGCCGGTTCCCAGAGGAGGAGGAAGGCGGCTGCGAACTGCGCGTGAAATTCAGCCG |
| | | CAGCGCAGATGCTCCAGCCTACAAGCAGGGGCAGAACCAGCTCTACAACGAACTCAAT |
| | | CTTGGTCGGAGAGAGGAGTACGACGTGCTGGACAAGCGGAGAGGACGGGACCCAGAAA |
| | | TGGGCGGGAAGCCGCGCAGAAAGAATCCCCAAGAGGGCCTGTACAACGAGCTCCAAAA |
| | | GGATAAGATGGCAGAAGCCTATAGCGAGATTGGTATGAAAGGGGAACGCAGAAGAGGC |
| | | AAAGGCCACGACGGACTGTACCAGGGACTCAGCACCGCCACCAAGGACACCTATGACG |
| | | CTCTTCACATGCAGGCCCTGCCGCCTCGG |
| 139101 | | |
| 139101-aa | 43 | QVQLQESGGGLVQPGGSLRLSCAASGFTFSSDAMTWVRQAPGKGLEWVSVISGSGGTT |
| ScFv domain | | YYADSVKGRFTISRDNSKNTLYLQMNSLRAEDTAVYYCAKLDSSGYYYARGPRYWGQG |
| | | TLVTVSSASGGGGSGGRASGGGGSDIQLTQSPSSLSASVGDRVTITCRASQSISSYLN |
| | | WYQQKPGKAPKLLIYGASTLASGVPARFSGSGSGTHFTLTINSLQSEDSATYYCQQSY |
| | | KRASFGQGTKVEIK |
| 139101-nt | 58 | CAAGTGCAACTTCAAGAATCAGGCGGAGGACTCGTGCAGCCCGGAGGATCATTGCGGC |
| ScFv domain | | TCTCGTGCGCCGCCTCGGGCTTCACCTTCTCGAGCGACGCCATGACCTGGGTCCGCCA |
| | | GGCCCCGGGGAAGGGGCTGGAATGGGTGTCTGTGATTTCCGGCTCCGGGGGAACTACG |
| | | TACTACGCCGATTCCGTGAAAGGTCGCTTCACTATCTCCCGGGACAACAGCAAGAACA |
| | | CCCTTTATCTGCAAATGAATTCCCTCCGCGCCGAGGACACCGCCGTGTACTACTGCGC |
| | | CAAGCTGGACTCCTCGGGCTACTACTATGCCCGGGGTCCGAGATACTGGGGACAGGGA |
| | | ACCCTCGTGACCGTGTCCTCCGCGTCCGGCGGAGGAGGGTCGGGAGGGCGGGCCTCCG |
| | | GCGGCGGCGGTTCGGACATCCAGCTGACCCAGTCCCCATCCTCACTGAGCGCAAGCGT |
| | | GGGCGACAGAGTCACCATTACATGCAGGGCGTCCCAGAGCATCAGCTCCTACCTGAAC |
| | | TGGTACCAACAGAAGCCTGGAAAGGCTCCTAAGCTGTTGATCTACGGGGCTTCGACCC |
| | | TGGCATCCGGGGTGCCCGCGAGGTTTAGCGGAAGCGGTAGCGGCACTCACTTCACTCT |
| | | GACCATTAACAGCCTCCAGTCCGAGGATTCAGCCACTTACTACTGTCAGCAGTCCTAC |
| | | AAGCGGGCCAGCTTCGGACAGGGCACTAAGGTCGAGATCAAG |
| 139101-aa | 73 | QVQLQESGGGLVQPGGSLRLSCAASGFTFSSDAMTWVRQAPGKGLEWVSVISGSGGTT |
| VH | | YYADSVKGRFTISRDNSKNTLYLQMNSLRAEDTAVYYCAKLDSSGYYYARGPRYWGQG |
| | | TLVTVSS |
| 139101-aa | 88 | DIQLTQSPSSLSASVGDRVTITCRASQSISSYLNWYQQKPGKAPKLLIYGASTLASGV |
| VL | | PARFSGSGSGTHFTLTINSLQSEDSATYYCQQSYKRASFGQGTKVEIK |
| 139101-aa | 103 | MALPVTALLLPLALLLHAARPQVQLQESGGGLVQPGGSLRLSCAASGFTFSSDAMTWV |
| Full CAR | | RQAPGKGLEWVSVISGSGGTTYYADSVKGRFTISRDNSKNTLYLQMNSLRAEDTAVYY |
| | | CAKLDSSGYYYARGPRYWGQGTLVTVSSASGGGGSGGRASGGGGSDIQLTQSPSSLSA |
| | | SVGDRVTITCRASQSISSYLNWYQQKPGKAPKLLIYGASTLASGVPARFSGSGSGTHF |
| | | TLTINSLQSEDSATYYCQQSYKRASFGQGTKVEIKTTTPAPRPPTPAPTIASQPLSLR |
| | | PEACRPAAGGAVHTRGLDFACDIYIWAPLAGTCGVLLLSLVITLYCKRGRKKLLYIFK |
| | | QPFMRPVQTTQEEDGCSCRFPEEEEGGCELRVKFSRSADAPAYKQGQNQLYNELNLGR |
| | | REEYDVLDKRRGRDPEMGGKPRRKNPQEGLYNELQKDKMAEAYSEIGMKGERRRGKGH |
| | | DGLYQGLSTATKDTYDALHMQALPPR |
| 139101-nt | 118 | ATGGCCCTCCCTGTCACCGCCCTGCTGCTTCCGCTGGCTCTTCTGCTCCACGCCGCTC |
| Full CAR | | GGCCCCAAGTGCAACTTCAAGAATCAGGCGGAGGACTCGTGCAGCCCGGAGGATCATT |
| | | GCGGCTCTCGTGCGCCGCCTCGGGCTTCACCTTCTCGAGCGACGCCATGACCTGGGTC |
| | | CGCCAGGCCCCGGGGAAGGGGCTGGAATGGGTGTCTGTGATTTCCGGCTCCGGGGGAA |
| | | CTACGTACTACGCCGATTCCGTGAAAGGTCGCTTCACTATCTCCCGGGACAACAGCAA |
| | | GAACACCCTTTATCTGCAAATGAATTCCCTCCGCGCCGAGGACACCGCCGTGTACTAC |
| | | TGCGCCAAGCTGGACTCCTCGGGCTACTACTATGCCCGGGGTCCGAGATACTGGGGAC |
| | | AGGGAACCCTCGTGACCGTGTCCTCCGCGTCCGGCGGAGGAGGGTCGGGAGGGCGGGC |
| | | CTCCGGCGGCGGCGGTTCGGACATCCAGCTGACCCAGTCCCCATCCTCACTGAGCGCA |
| | | AGCGTGGGCGACAGAGTCACCATTACATGCAGGGCGTCCCAGAGCATCAGCTCCTACC |
| | | TGAACTGGTACCAACAGAAGCCTGGAAAGGCTCCTAAGCTGTTGATCTACGGGGCTTC |
| | | GACCCTGGCATCCGGGGTGCCCGCGAGGTTTAGCGGAAGCGGTAGCGGCACTCACTTC |
| | | ACTCTGACCATTAACAGCCTCCAGTCCGAGGATTCAGCCACTTACTACTGTCAGCAGT |
| | | CCTACAAGCGGGCCAGCTTCGGACAGGGCACTAAGGTCGAGATCAAGACCACTACCCC |
| | | AGCACCGAGGCCACCCACCCCGGCTCCTACCATCGCCTCCCAGCCTCTGTCCCTGCGT |
| | | CCGGAGGCATGTAGACCCGCAGCTGGTGGGGCCGTGCATACCCGGGGTCTTGACTTCG |
| | | CCTGCGATATCTACATTTGGGCCCCTCTGGCTGGTACTTGCGGGGTCCTGCTGCTTTC |
| | | ACTCGTGATCACTCTTTACTGTAAGCGCGGTCGGAAGAAGCTGCTGTACATCTTTAAG |
| | | CAACCCTTCATGAGGCCTGTGCAGACTACTCAAGAGGAGGACGGCTGTTCATGCCGGT |
| | | TCCCAGAGGAGGAGGAAGGCGGCTGCGAACTGCGCGTGAAATTCAGCCGCAGCGCAGA |
| | | TGCTCCAGCCTACAAGCAGGGGCAGAACCAGCTCTACAACGAACTCAATCTTGGTCGG |
| | | AGAGAGGAGTACGACGTGCTGGACAAGCGGAGAGGACGGGACCCAGAAATGGGCGGGA |
| | | AGCCGCGCAGAAAGAATCCCCAAGAGGGCCTGTACAACGAGCTCCAAAAGGATAAGAT |
| | | GGCAGAAGCCTATAGCGAGATTGGTATGAAAGGGGAACGCAGAAGAGGCAAAGGCCAC |
| | | GACGGACTGTACCAGGGACTCAGCACCGCCACCAAGGACACCTATGACGCTCTTCACA |
| | | TGCAGGCCCTGCCGCCTCGG |
| 139102 | | |
| 139102-aa | 44 | QVQLVQSGAEVKKPGASVKVSCKASGYTFSNYGITWVRQAPGQGLEWMGWISAYNGNT |
| ScFv domain | | NYAQKFQGRVTMTRNTSISTAYMELSSLRSEDTAVYYCARGPYYYYMDVWGKGTMVTV |
| | | SSASGGGGSGGRASGGGGSEIVMTQSPLSLPVTPGEPASISCRSSQSLLYSNGYNYVD |
| | | WYLQKPGQSPQLLIYLGSNRASGVPDRFSGSGSGTDFKLQISRVEAEDVGIYYCMQGR |
| | | QFPYSFGQGTKVEIK |
| 139102-nt | 59 | CAAGTCCAACTGGTCCAGAGCGGTGCAGAAGTGAAGAAGCCCGGAGCGAGCGTGAAAG |
| ScFv domain | | TGTCCTGCAAGGCTTCCGGGTACACCTTCTCCAACTACGGCATCACTTGGGTGCGCCA |
| | | GGCCCCGGGACAGGGCCTGGAATGGATGGGGTGGATTTCCGCGTACAACGGCAATACG |
| | | AACTACGCTCAGAAGTTCCAGGGTAGAGTGACCATGACTAGGAACACCTCCATTTCCA |
| | | CCGCCTACATGGAACTGTCCTCCCTGCGGAGCGAGGACACCGCCGTGTACTATTGCGC |
| | | CCGGGGACCATACTACTACTACATGGATGTCTGGGGGAAGGGGACTATGGTCACCGTG |
| | | TCATCCGCCTCGGGAGGCGGCGGATCAGGAGGACGCGCCTCTGGTGGTGGAGGATCGG |
| | | AGATCGTGATGACCCAGAGCCCTCTCTCCTTGCCCGTGACTCCTGGGGAGCCCGCATC |
| | | CATTTCATGCCGGAGCTCCCAGTCACTTCTCTACTCCAACGGCTATAACTACGTGGAT |
| | | TGGTACCTCCAAAAGCCGGGCCAGAGCCCGCAGCTGCTGATCTACCTGGGCTCGAACA |
| | | GGGCCAGCGGAGTGCCTGACCGGTTCTCCGGGTCGGGAAGCGGGACCGACTTCAAGCT |
| | | GCAAATCTCGAGAGTGGAGGCCGAGGACGTGGGAATCTACTACTGTATGCAGGGCCGC |
| | | CAGTTTCCGTACTCGTTCGGACAGGGCACCAAAGTGGAAATCAAG |
| 139102-aa | 74 | QVQLVQSGAEVKKPGASVKVSCKASGYTFSNYGITWVRQAPGQGLEWMGWISAYNGNT |
| VH | | NYAQKFQGRVTMTRNTSISTAYMELSSLRSEDTAVYYCARGPYYYYMDVWGKGTMVTV |
| | | SS |
| 139102-aa | 89 | EIVMTQSPLSLPVTPGEPASISCRSSQSLLYSNGYNYVDWYLQKPGQSPQLLIYLGSN |
| VL | | RASGVPDRFSGSGSGTDFKLQISRVEAEDVGIYYCMQGRQFPYSFGQGTKVEIK |
| 139102-aa | 104 | MALPVTALLLPLALLLHAARPQVQLVQSGAEVKKPGASVKVSCKASGYTFSNYGITWV |
| Full CAR | | RQAPGQGLEWMGWISAYNGNTNYAQKFQGRVTMTRNTSISTAYMELSSLRSEDTAVYY |
| | | CARGPYYYYMDVWGKGTMVTVSSASGGGGSGGRASGGGGSEIVMTQSPLSLPVTPGEP |
| | | ASISCRSSQSLLYSNGYNYVDWYLQKPGQSPQLLIYLGSNRASGVPDRFSGSGSGTDF |
| | | KLQISRVEAEDVGIYYCMQGRQFPYSFGQGTKVEIKTTTPAPRPPTPAPTIASQPLSL |
| | | RPEACRPAAGGAVHTRGLDFACDIYIWAPLAGTCGVLLLSLVITLYCKRGRKKLLYIF |
| | | KQPFMRPVQTTQEEDGCSCRFPEEEEGGCELRVKFSRSADAPAYKQGQNQLYNELNLG |
| | | RREEYDVLDKRRGRDPEMGGKPRRKNPQEGLYNELQKDKMAEAYSEIGMKGERRRGKG |
| | | HDGLYQGLSTATKDTYDALHMQALPPR |
| 139102-nt | 119 | ATGGCCCTCCCTGTCACCGCCCTGCTGCTTCCGCTGGCTCTTCTGCTCCACGCCGCTC |
| Full CAR | | GGCCCCAAGTCCAACTGGTCCAGAGCGGTGCAGAAGTGAAGAAGCCCGGAGCGAGCGT |
| | | GAAAGTGTCCTGCAAGGCTTCCGGGTACACCTTCTCCAACTACGGCATCACTTGGGTG |
| | | CGCCAGGCCCCGGGACAGGGCCTGGAATGGATGGGGTGGATTTCCGCGTACAACGGCA |
| | | ATACGAACTACGCTCAGAAGTTCCAGGGTAGAGTGACCATGACTAGGAACACCTCCAT |
| | | TTCCACCGCCTACATGGAACTGTCCTCCCTGCGGAGCGAGGACACCGCCGTGTACTAT |
| | | TGCGCCCGGGGACCATACTACTACTACATGGATGTCTGGGGGAAGGGGACTATGGTCA |
| | | CCGTGTCATCCGCCTCGGGAGGCGGCGGATCAGGAGGACGCGCCTCTGGTGGTGGAGG |
| | | ATCGGAGATCGTGATGACCCAGAGCCCTCTCTCCTTGCCCGTGACTCCTGGGGAGCCC |
| | | GCATCCATTTCATGCCGGAGCTCCCAGTCACTTCTCTACTCCAACGGCTATAACTACG |
| | | TGGATTGGTACCTCCAAAAGCCGGGCCAGAGCCCGCAGCTGCTGATCTACCTGGGCTC |
| | | GAACAGGGCCAGCGGAGTGCCTGACCGGTTCTCCGGGTCGGGAAGCGGGACCGACTTC |
| | | AAGCTGCAAATCTCGAGAGTGGAGGCCGAGGACGTGGGAATCTACTACTGTATGCAGG |
| | | GCCGCCAGTTTCCGTACTCGTTCGGACAGGGCACCAAAGTGGAAATCAAGACCACTAC |
| | | CCCAGCACCGAGGCCACCCACCCCGGCTCCTACCATCGCCTCCCAGCCTCTGTCCCTG |
| | | CGTCCGGAGGCATGTAGACCCGCAGCTGGTGGGGCCGTGCATACCCGGGGTCTTGACT |
| | | TCGCCTGCGATATCTACATTTGGGCCCCTCTGGCTGGTACTTGCGGGGTCCTGCTGCT |
| | | TTCACTCGTGATCACTCTTTACTGTAAGCGCGGTCGGAAGAAGCTGCTGTACATCTTT |
| | | AAGCAACCCTTCATGAGGCCTGTGCAGACTACTCAAGAGGAGGACGGCTGTTCATGCC |
| | | GGTTCCCAGAGGAGGAGGAAGGCGGCTGCGAACTGCGCGTGAAATTCAGCCGCAGCGC |
| | | AGATGCTCCAGCCTACAAGCAGGGGCAGAACCAGCTCTACAACGAACTCAATCTTGGT |
| | | CGGAGAGAGGAGTACGACGTGCTGGACAAGCGGAGAGGACGGGACCCAGAAATGGGCG |
| | | GGAAGCCGCGCAGAAAGAATCCCCAAGAGGGCCTGTACAACGAGCTCCAAAAGGATAA |
| | | GATGGCAGAAGCCTATAGCGAGATTGGTATGAAAGGGGAACGCAGAAGAGGCAAAGGC |
| | | CACGACGGACTGTACCAGGGACTCAGCACCGCCACCAAGGACACCTATGACGCTCTTC |
| | | ACATGCAGGCCCTGCCGCCTCGG |
| 139104 | | |
| 139104-aa | 45 | EVQLLETGGGLVQPGGSLRLSCAVSGFALSNHGMSWVRRAPGKGLEWVSGIVYSGSTY |
| ScFv domain | | YAASVKGRFTISRDNSRNTLYLQMNSLRPEDTAIYYCSAHGGESDVWGQGTTVTVSSA |
| | | SGGGGSGGRASGGGGSEIVLTQSPATLSVSPGESATLSCRASQSVSSNLAWYQQKPGQ |
| | | APRLLIYGASTRASGIPDRFSGSGSGTDFTLTISSLQAEDVAVYYCQQYGSSLTFGGG |
| | | TKVEIK |
| 139104-nt | 60 | GAAGTGCAATTGCTCGAAACTGGAGGAGGTCTGGTGCAACCTGGAGGATCACTTCGCC |
| ScFv domain | | TGTCCTGCGCCGTGTCGGGCTTTGCCCTGTCCAACCATGGAATGAGCTGGGTCCGCCG |
| | | CGCGCCGGGGAAGGGCCTCGAATGGGTGTCCGGCATCGTCTACTCCGGCTCCACCTAC |
| | | TACGCCGCGTCCGTGAAGGGCCGGTTCACGATTTCACGGGACAACTCGCGGAACACCC |
| | | TGTACCTCCAAATGAATTCCCTTCGGCCGGAGGATACTGCCATCTACTACTGCTCCGC |
| | | CCACGGTGGCGAATCCGACGTCTGGGGCCAGGGAACCACCGTGACCGTGTCCAGCGCG |
| | | TCCGGGGGAGGAGGAAGCGGGGGTAGAGCATCGGGTGGAGGCGGATCAGAGATCGTGC |
| | | TGACCCAGTCCCCCGCCACCTTGAGCGTGTCACCAGGAGAGTCCGCCACCCTGTCATG |
| | | CCGCGCCAGCCAGTCCGTGTCCTCCAACCTGGCTTGGTACCAGCAGAAGCCGGGGCAG |
| | | GCCCCTAGACTCCTGATCTATGGGGCGTCGACCCGGGCATCTGGAATTCCCGATAGGT |
| | | TCAGCGGATCGGGCTCGGGCACTGACTTCACTCTGACCATCTCCTCGCTGCAAGCCGA |
| | | GGACGTGGCTGTGTACTACTGTCAGCAGTACGGAAGCTCCCTGACTTTCGGTGGCGGG |
| | | ACCAAAGTCGAGATTAAG |
| 139104-aa | 75 | EVQLLETGGGLVQPGGSLRLSCAVSGFALSNHGMSWVRRAPGKGLEWVSGIVYSGSTY |
| VH | | YAASVKGRFTISRDNSRNTLYLQMNSLRPEDTAIYYCSAHGGESDVWGQGTTVTVSS |
| 139104-aa | 90 | EIVLTQSPATLSVSPGESATLSCRASQSVSSNLAWYQQKPGQAPRLLIYGASTRASGI |
| VL | | PDRFSGSGSGTDFTLTISSLQAEDVAVYYCQQYGSSLTFGGGTKVEIK |
| 139104-aa | 105 | MALPVTALLLPLALLLHAARPEVQLLETGGGLVQPGGSLRLSCAVSGFALSNHGMSWV |
| Full CAR | | RRAPGKGLEWVSGIVYSGSTYYAASVKGRFTISRDNSRNTLYLQMNSLRPEDTAIYYC |
| | | SAHGGESDVWGQGTTVTVSSASGGGGSGGRASGGGGSEIVLTQSPATLSVSPGESATL |
| | | SCRASQSVSSNLAWYQQKPGQAPRLLIYGASTRASGIPDRFSGSGSGTDFTLTISSLQ |
| | | AEDVAVYYCQQYGSSLTFGGGTKVEIKTTTPAPRPPTPAPTIASQPLSLRPEACRPAA |
| | | GGAVHTRGLDFACDIYIWAPLAGTCGVLLLSLVITLYCKRGRKKLLYIFKQPFMRPVQ |
| | | TTQEEDGCSCRFPEEEEGGCELRVKFSRSADAPAYKQGQNQLYNELNLGRREEYDVLD |
| | | KRRGRDPEMGGKPRRKNPQEGLYNELQKDKMAEAYSEIGMKGERRRGKGHDGLYQGLS |
| | | TATKDTYDALHMQALPPR |
| 139104-nt | 120 | ATGGCCCTCCCTGTCACCGCCCTGCTGCTTCCGCTGGCTCTTCTGCTCCACGCCGCTC |
| Full CAR | | GGCCCGAAGTGCAATTGCTCGAAACTGGAGGAGGTCTGGTGCAACCTGGAGGATCACT |
| | | TCGCCTGTCCTGCGCCGTGTCGGGCTTTGCCCTGTCCAACCATGGAATGAGCTGGGTC |
| | | CGCCGCGCGCCGGGGAAGGGCCTCGAATGGGTGTCCGGCATCGTCTACTCCGGCTCCA |
| | | CCTACTACGCCGCGTCCGTGAAGGGCCGGTTCACGATTTCACGGGACAACTCGCGGAA |
| | | CACCCTGTACCTCCAAATGAATTCCCTTCGGCCGGAGGATACTGCCATCTACTACTGC |
| | | TCCGCCCACGGTGGCGAATCCGACGTCTGGGGCCAGGGAACCACCGTGACCGTGTCCA |
| | | GCGCGTCCGGGGGAGGAGGAAGCGGGGGTAGAGCATCGGGTGGAGGCGGATCAGAGAT |
| | | CGTGCTGACCCAGTCCCCCGCCACCTTGAGCGTGTCACCAGGAGAGTCCGCCACCCTG |
| | | TCATGCCGCGCCAGCCAGTCCGTGTCCTCCAACCTGGCTTGGTACCAGCAGAAGCCGG |
| | | GGCAGGCCCCTAGACTCCTGATCTATGGGGCGTCGACCCGGGCATCTGGAATTCCCGA |
| | | TAGGTTCAGCGGATCGGGCTCGGGCACTGACTTCACTCTGACCATCTCCTCGCTGCAA |
| | | GCCGAGGACGTGGCTGTGTACTACTGTCAGCAGTACGGAAGCTCCCTGACTTTCGGTG |
| | | GCGGGACCAAAGTCGAGATTAAGACCACTACCCCAGCACCGAGGCCACCCACCCCGGC |
| | | TCCTACCATCGCCTCCCAGCCTCTGTCCCTGCGTCCGGAGGCATGTAGACCCGCAGCT |
| | | GGTGGGGCCGTGCATACCCGGGGTCTTGACTTCGCCTGCGATATCTACATTTGGGCCC |
| | | CTCTGGCTGGTACTTGCGGGGTCCTGCTGCTTTCACTCGTGATCACTCTTTACTGTAA |
| | | GCGCGGTCGGAAGAAGCTGCTGTACATCTTTAAGCAACCCTTCATGAGGCCTGTGCAG |
| | | ACTACTCAAGAGGAGGACGGCTGTTCATGCCGGTTCCCAGAGGAGGAGGAAGGCGGCT |
| | | GCGAACTGCGCGTGAAATTCAGCCGCAGCGCAGATGCTCCAGCCTACAAGCAGGGGCA |
| | | GAACCAGCTCTACAACGAACTCAATCTTGGTCGGAGAGAGGAGTACGACGTGCTGGAC |
| | | AAGCGGAGAGGACGGGACCCAGAAATGGGCGGGAAGCCGCGCAGAAAGAATCCCCAAG |
| | | AGGGCCTGTACAACGAGCTCCAAAAGGATAAGATGGCAGAAGCCTATAGCGAGATTGG |
| | | TATGAAAGGGGAACGCAGAAGAGGCAAAGGCCACGACGGACTGTACCAGGGACTCAGC |
| | | ACCGCCACCAAGGACACCTATGACGCTCTTCACATGCAGGCCCTGCCGCCTCGG |
| 139106 | | |
| 139106-aa | 46 | EVQLVETGGGLVQPGGSLRLSCAVSGFALSNHGMSWVRRAPGKGLEWVSGIVYSGSTY |
| ScFv domain | | YAASVKGRFTISRDNSRNTLYLQMNSLRPEDTAIYYCSAHGGESDVWGQGTTVTVSSA |
| | | SGGGGSGGRASGGGGSEIVMTQSPATLSVSPGERATLSCRASQSVSSKLAWYQQKPGQ |
| | | APRLLMYGASIRATGIPDRFSGSGSGTEFTLTISSLEPEDFAVYYCQQYGSSSWTFGQ |
| | | GTKVEIK |
| 139106-nt | 61 | GAAGTGCAATTGGTGGAAACTGGAGGAGGACTTGTGCAACCTGGAGGATCATTGAGAC |
| ScFv domain | | TGAGCTGCGCAGTGTCGGGATTCGCCCTGAGCAACCATGGAATGTCCTGGGTCAGAAG |
| | | GGCCCCTGGAAAAGGCCTCGAATGGGTGTCAGGGATCGTGTACTCCGGTTCCACTTAC |
| | | TACGCCGCCTCCGTGAAGGGGCGCTTCACTATCTCACGGGATAACTCCCGCAATACCC |
| | | TGTACCTCCAAATGAACAGCCTGCGGCCGGAGGATACCGCCATCTACTACTGTTCCGC |
| | | CCACGGTGGAGAGTCTGACGTCTGGGGCCAGGGAACTACCGTGACCGTGTCCTCCGCG |
| | | TCCGGCGGTGGAGGGAGCGGCGGCCGCGCCAGCGGCGGCGGAGGCTCCGAGATCGTGA |
| | | TGACCCAGAGCCCCGCTACTCTGTCGGTGTCGCCCGGAGAAAGGGCGACCCTGTCCTG |
| | | CCGGGCGTCGCAGTCCGTGAGCAGCAAGCTGGCTTGGTACCAGCAGAAGCCGGGCCAG |
| | | GCACCACGCCTGCTTATGTACGGTGCCTCCATTCGGGCCACCGGAATCCCGGACCGGT |
| | | TCTCGGGGTCGGGGTCCGGTACCGAGTTCACACTGACCATTTCCTCGCTCGAGCCCGA |
| | | GGACTTTGCCGTCTATTACTGCCAGCAGTACGGCTCCTCCTCATGGACGTTCGGCCAG |
| | | GGGACCAAGGTCGAAATCAAG |
| 139106-aa | 76 | EVQLVETGGGLVQPGGSLRLSCAVSGFALSNHGMSWVRRAPGKGLEWVSGIVYSGSTY |
| VH | | YAASVKGRFTISRDNSRNTLYLQMNSLRPEDTAIYYCSAHGGESDVWGQGTTVTVSS |
| 139106-aa | 91 | EIVMTQSPATLSVSPGERATLSCRASQSVSSKLAWYQQKPGQAPRLLMYGASIRATGI |
| VL | | PDRFSGSGSGTEFTLTISSLEPEDFAVYYCQQYGSSSWTFGQGTKVEIK |
| 139106-aa | 106 | MALPVTALLLPLALLLHAARPEVQLVETGGGLVQPGGSLRLSCAVSGFALSNHGMSWV |
| Full CAR | | RRAPGKGLEWVSGIVYSGSTYYAASVKGRFTISRDNSRNTLYLQMNSLRPEDTAIYYC |
| | | SAHGGESDVWGQGTTVTVSSASGGGGSGGRASGGGGSEIVMTQSPATLSVSPGERATL |
| | | SCRASQSVSSKLAWYQQKPGQAPRLLMYGASIRATGIPDRFSGSGSGTEFTLTISSLE |
| | | PEDFAVYYCQQYGSSSWTFGQGTKVEIKTTTPAPRPPTPAPTIASQPLSLRPEACRPA |
| | | AGGAVHTRGLDFACDIYIWAPLAGTCGVLLLSLVITLYCKRGRKKLLYIFKQPFMRPV |
| | | QTTQEEDGCSCRFPEEEEGGCELRVKFSRSADAPAYKQGQNQLYNELNLGRREEYDVL |
| | | DKRRGRDPEMGGKPRRKNPQEGLYNELQKDKMAEAYSEIGMKGERRRGKGHDGLYQGL |
| | | STATKDTYDALHMQALPPR |
| 139106-nt | 121 | ATGGCCCTCCCTGTCACCGCCCTGCTGCTTCCGCTGGCTCTTCTGCTCCACGCCGCTC |
| Full CAR | | GGCCCGAAGTGCAATTGGTGGAAACTGGAGGAGGACTTGTGCAACCTGGAGGATCATT |
| | | GAGACTGAGCTGCGCAGTGTCGGGATTCGCCCTGAGCAACCATGGAATGTCCTGGGTC |
| | | AGAAGGGCCCCTGGAAAAGGCCTCGAATGGGTGTCAGGGATCGTGTACTCCGGTTCCA |
| | | CTTACTACGCCGCCTCCGTGAAGGGGCGCTTCACTATCTCACGGGATAACTCCCGCAA |
| | | TACCCTGTACCTCCAAATGAACAGCCTGCGGCCGGAGGATACCGCCATCTACTACTGT |
| | | TCCGCCCACGGTGGAGAGTCTGACGTCTGGGGCCAGGGAACTACCGTGACCGTGTCCT |
| | | CCGCGTCCGGCGGTGGAGGGAGCGGCGGCCGCGCCAGCGGCGGCGGAGGCTCCGAGAT |
| | | CGTGATGACCCAGAGCCCCGCTACTCTGTCGGTGTCGCCCGGAGAAAGGGCGACCCTG |
| | | TCCTGCCGGGCGTCGCAGTCCGTGAGCAGCAAGCTGGCTTGGTACCAGCAGAAGCCGG |
| | | GCCAGGCACCACGCCTGCTTATGTACGGTGCCTCCATTCGGGCCACCGGAATCCCGGA |
| | | CCGGTTCTCGGGGTCGGGGTCCGGTACCGAGTTCACACTGACCATTTCCTCGCTCGAG |
| | | CCCGAGGACTTTGCCGTCTATTACTGCCAGCAGTACGGCTCCTCCTCATGGACGTTCG |
| | | GCCAGGGGACCAAGGTCGAAATCAAGACCACTACCCCAGCACCGAGGCCACCCACCCC |
| | | GGCTCCTACCATCGCCTCCCAGCCTCTGTCCCTGCGTCCGGAGGCATGTAGACCCGCA |
| | | GCTGGTGGGGCCGTGCATACCCGGGGTCTTGACTTCGCCTGCGATATCTACATTTGGG |
| | | CCCCTCTGGCTGGTACTTGCGGGGTCCTGCTGCTTTCACTCGTGATCACTCTTTACTG |
| | | TAAGCGCGGTCGGAAGAAGCTGCTGTACATCTTTAAGCAACCCTTCATGAGGCCTGTG |
| | | CAGACTACTCAAGAGGAGGACGGCTGTTCATGCCGGTTCCCAGAGGAGGAGGAAGGCG |
| | | GCTGCGAACTGCGCGTGAAATTCAGCCGCAGCGCAGATGCTCCAGCCTACAAGCAGGG |
| | | GCAGAACCAGCTCTACAACGAACTCAATCTTGGTCGGAGAGAGGAGTACGACGTGCTG |
| | | GACAAGCGGAGAGGACGGGACCCAGAAATGGGCGGGAAGCCGCGCAGAAAGAATCCCC |
| | | AAGAGGGCCTGTACAACGAGCTCCAAAAGGATAAGATGGCAGAAGCCTATAGCGAGAT |
| | | TGGTATGAAAGGGGAACGCAGAAGAGGCAAAGGCCACGACGGACTGTACCAGGGACTC |
| | | AGCACCGCCACCAAGGACACCTATGACGCTCTTCACATGCAGGCCCTGCCGCCTCGG |
| 139107 | | |
| 139107-aa | 47 | EVQLVETGGGVVQPGGSLRLSCAVSGFALSNHGMSWVRRAPGKGLEWVSGIVYSGSTY |
| ScFv domain | | YAASVKGRFTISRDNSRNTLYLQMNSLRPEDTAIYYCSAHGGESDVWGQGTTVTVSSA |
| | | SGGGGSGGRASGGGGSEIVLTQSPGTLSLSPGERATLSCRASQSVGSTNLAWYQQKPG |
| | | QAPRLLIYDASNRATGIPDRFSGGGSGTDFTLTISRLEPEDFAVYYCQQYGSSPPWTF |
| | | GQGTKVEIK |
| 139107-nt | 62 | GAAGTGCAATTGGTGGAGACTGGAGGAGGAGTGGTGCAACCTGGAGGAAGCCTGAGAC |
| ScFv domain | | TGTCATGCGCGGTGTCGGGCTTCGCCCTCTCCAACCACGGAATGTCCTGGGTCCGCCG |
| | | GGCCCCTGGGAAAGGACTTGAATGGGTGTCCGGCATCGTGTACTCGGGTTCCACCTAC |
| | | TACGCGGCCTCAGTGAAGGGCCGGTTTACTATTAGCCGCGACAACTCCAGAAACACAC |
| | | TGTACCTCCAAATGAACTCGCTGCGGCCGGAAGATACCGCTATCTACTACTGCTCCGC |
| | | CCATGGGGGAGAGTCGGACGTCTGGGGACAGGGCACCACTGTCACTGTGTCCAGCGCT |
| | | TCCGGCGGTGGTGGAAGCGGGGGACGGGCCTCAGGAGGCGGTGGCAGCGAGATTGTGC |
| | | TGACCCAGTCCCCCGGGACCCTGAGCCTGTCCCCGGGAGAAAGGGCCACCCTCTCCTG |
| | | TCGGGCATCCCAGTCCGTGGGGTCTACTAACCTTGCATGGTACCAGCAGAAGCCCGGC |
| | | CAGGCCCCTCGCCTGCTGATCTACGACGCGTCCAATAGAGCCACCGGCATCCCGGATC |
| | | GCTTCAGCGGAGGCGGATCGGGCACCGACTTCACCCTCACCATTTCAAGGCTGGAACC |
| | | GGAGGACTTCGCCGTGTACTACTGCCAGCAGTATGGTTCGTCCCCACCCTGGACGTTC |
| | | GGCCAGGGGACTAAGGTCGAGATCAAG |
| 139107-aa | 77 | EVQLVETGGGVVQPGGSLRLSCAVSGFALSNHGMSWVRRAPGKGLEWVSGIVYSGSTY |
| VH | | YAASVKGRFTISRDNSRNTLYLQMNSLRPEDTAIYYCSAHGGESDVWGQGTTVTVSS |
| 139107-aa | 92 | EIVLTQSPGTLSLSPGERATLSCRASQSVGSTNLAWYQQKPGQAPRLLIYDASNRATG |
| VL | | IPDRFSGGGSGTDFTLTISRLEPEDFAVYYCQQYGSSPPWTFGQGTKVEIK |
| 139107-aa | 107 | MALPVTALLLPLALLLHAARPEVQLVETGGGVVQPGGSLRLSCAVSGFALSNHGMSWV |
| Full CAR | | RRAPGKGLEWVSGIVYSGSTYYAASVKGRFTISRDNSRNTLYLQMNSLRPEDTAIYYC |
| | | SAHGGESDVWGQGTTVTVSSASGGGGSGGRASGGGGSEIVLTQSPGTLSLSPGERATL |
| | | SCRASQSVGSTNLAWYQQKPGQAPRLLIYDASNRATGIPDRFSGGGSGTDFTLTISRL |
| | | EPEDFAVYYCQQYGSSPPWTFGQGTKVEIKTTTPAPRPPTPAPTIASQPLSLRPEACR |
| | | PAAGGAVHTRGLDFACDIYIWAPLAGTCGVLLLSLVITLYCKRGRKKLLYIFKQPFMR |
| | | PVQTTQEEDGCSCRFPEEEEGGCELRVKFSRSADAPAYKQGQNQLYNELNLGRREEYD |
| | | VLDKRRGRDPEMGGKPRRKNPQEGLYNELQKDKMAEAYSEIGMKGERRRGKGHDGLYQ |
| | | GLSTATKDTYDALHMQALPPR |
| 139107-nt | 122 | ATGGCCCTCCCTGTCACCGCCCTGCTGCTTCCGCTGGCTCTTCTGCTCCACGCCGCTC |
| Full CAR | | GGCCCGAAGTGCAATTGGTGGAGACTGGAGGAGGAGTGGTGCAACCTGGAGGAAGCCT |
| | | GAGACTGTCATGCGCGGTGTCGGGCTTCGCCCTCTCCAACCACGGAATGTCCTGGGTC |
| | | CGCCGGGCCCCTGGGAAAGGACTTGAATGGGTGTCCGGCATCGTGTACTCGGGTTCCA |
| | | CCTACTACGCGGCCTCAGTGAAGGGCCGGTTTACTATTAGCCGCGACAACTCCAGAAA |
| | | CACACTGTACCTCCAAATGAACTCGCTGCGGCCGGAAGATACCGCTATCTACTACTGC |
| | | TCCGCCCATGGGGGAGAGTCGGACGTCTGGGGACAGGGCACCACTGTCACTGTGTCCA |
| | | GCGCTTCCGGCGGTGGTGGAAGCGGGGGACGGGCCTCAGGAGGCGGTGGCAGCGAGAT |
| | | TGTGCTGACCCAGTCCCCCGGGACCCTGAGCCTGTCCCCGGGAGAAAGGGCCACCCTC |
| | | TCCTGTCGGGCATCCCAGTCCGTGGGGTCTACTAACCTTGCATGGTACCAGCAGAAGC |
| | | CCGGCCAGGCCCCTCGCCTGCTGATCTACGACGCGTCCAATAGAGCCACCGGCATCCC |
| | | GGATCGCTTCAGCGGAGGCGGATCGGGCACCGACTTCACCCTCACCATTTCAAGGCTG |
| | | GAACCGGAGGACTTCGCCGTGTACTACTGCCAGCAGTATGGTTCGTCCCCACCCTGGA |
| | | CGTTCGGCCAGGGGACTAAGGTCGAGATCAAGACCACTACCCCAGCACCGAGGCCACC |
| | | CACCCCGGCTCCTACCATCGCCTCCCAGCCTCTGTCCCTGCGTCCGGAGGCATGTAGA |
| | | CCCGCAGCTGGTGGGGCCGTGCATACCCGGGGTCTTGACTTCGCCTGCGATATCTACA |
| | | TTTGGGCCCCTCTGGCTGGTACTTGCGGGGTCCTGCTGCTTTCACTCGTGATCACTCT |
| | | TTACTGTAAGCGCGGTCGGAAGAAGCTGCTGTACATCTTTAAGCAACCCTTCATGAGG |
| | | CCTGTGCAGACTACTCAAGAGGAGGACGGCTGTTCATGCCGGTTCCCAGAGGAGGAGG |
| | | AAGGCGGCTGCGAACTGCGCGTGAAATTCAGCCGCAGCGCAGATGCTCCAGCCTACAA |
| | | GCAGGGGCAGAACCAGCTCTACAACGAACTCAATCTTGGTCGGAGAGAGGAGTACGAC |
| | | GTGCTGGACAAGCGGAGAGGACGGGACCCAGAAATGGGCGGGAAGCCGCGCAGAAAGA |
| | | ATCCCCAAGAGGGCCTGTACAACGAGCTCCAAAAGGATAAGATGGCAGAAGCCTATAG |
| | | CGAGATTGGTATGAAAGGGGAACGCAGAAGAGGCAAAGGCCACGACGGACTGTACCAG |
| | | GGACTCAGCACCGCCACCAAGGACACCTATGACGCTCTTCACATGCAGGCCCTGCCGC |
| | | CTCGG |
| 139108 | | |
| 139108-aa | 48 | QVQLVESGGGLVKPGGSLRLSCAASGFTFSDYYMSWIRQAPGKGLEWVSYISSSGSTI |
| ScFv domain | | YYADSVKGRFTISRDNAKNSLYLQMNSLRAEDTAVYYCARESGDGMDVWGQGTTVTVS |
| | | SASGGGGSGGRASGGGGSDIQMTQSPSSLSASVGDRVTITCRASQSISSYLNWYQQKP |
| | | GKAPKLLIYAASSLQSGVPSRFSGSGSGTDFTLTISSLQPEDFATYYCQQSYTLAFGQ |
| | | GTKVDIK |
| 139108-nt | 63 | CAAGTGCAACTCGTGGAATCTGGTGGAGGACTCGTGAAACCTGGAGGATCATTGAGAC |
| ScFv domain | | TGTCATGCGCGGCCTCGGGATTCACGTTCTCCGATTACTACATGAGCTGGATTCGCCA |
| | | GGCTCCGGGGAAGGGACTGGAATGGGTGTCCTACATTTCCTCATCCGGCTCCACCATC |
| | | TACTACGCGGACTCCGTGAAGGGGAGATTCACCATTAGCCGCGATAACGCCAAGAACA |
| | | GCCTGTACCTTCAGATGAACTCCCTGCGGGCTGAAGATACTGCCGTCTACTACTGCGC |
| | | AAGGGAGAGCGGAGATGGGATGGACGTCTGGGGACAGGGTACCACTGTGACCGTGTCG |
| | | TCGGCCTCCGGCGGAGGGGGTTCGGGTGGAAGGGCCAGCGGCGGCGGAGGCAGCGACA |
| | | TCCAGATGACCCAGTCCCCCTCATCGCTGTCCGCCTCCGTGGGCGACCGCGTCACCAT |
| | | CACATGCCGGGCCTCACAGTCGATCTCCTCCTACCTCAATTGGTATCAGCAGAAGCCC |
| | | GGAAAGGCCCCTAAGCTTCTGATCTACGCAGCGTCCTCCCTGCAATCCGGGGTCCCAT |
| | | CTCGGTTCTCCGGCTCGGGCAGCGGTACCGACTTCACTCTGACCATCTCGAGCCTGCA |
| | | GCCGGAGGACTTCGCCACTTACTACTGTCAGCAAAGCTACACCCTCGCGTTTGGCCAG |
| | | GGCACCAAAGTGGACATCAAG |
| 139108-aa | 78 | QVQLVESGGGLVKPGGSLRLSCAASGFTFSDYYMSWIRQAPGKGLEWVSYISSSGSTI |
| VH | | YYADSVKGRFTISRDNAKNSLYLQMNSLRAEDTAVYYCARESGDGMDVWGQGTTVTVS |
| | | S |
| 139108-aa | 93 | DIQMTQSPSSLSASVGDRVTITCRASQSISSYLNWYQQKPGKAPKLLIYAASSLQSGV |
| VL | | PSRFSGSGSGTDFTLTISSLQPEDFATYYCQQSYTLAFGQGTKVDIK |
| 139108-aa | 108 | MALPVTALLLPLALLLHAARPQVQLVESGGGLVKPGGSLRLSCAASGFTFSDYYMSWI |
| Full CAR | | RQAPGKGLEWVSYISSSGSTIYYADSVKGRFTISRDNAKNSLYLQMNSLRAEDTAVYY |
| | | CARESGDGMDVWGQGTTVTVSSASGGGGSGGRASGGGGSDIQMTQSPSSLSASVGDRV |
| | | TITCRASQSISSYLNWYQQKPGKAPKLLIYAASSLQSGVPSRFSGSGSGTDFTLTISS |
| | | LQPEDFATYYCQQSYTLAFGQGTKVDIKTTTPAPRPPTPAPTIASQPLSLRPEACRPA |
| | | AGGAVHTRGLDFACDIYIWAPLAGTCGVLLLSLVITLYCKRGRKKLLYIFKQPFMRPV |
| | | QTTQEEDGCSCRFPEEEEGGCELRVKFSRSADAPAYKQGQNQLYNELNLGRREEYDVL |
| | | DKRRGRDPEMGGKPRRKNPQEGLYNELQKDKMAEAYSEIGMKGERRRGKGHDGLYQGL |
| | | STATKDTYDALHMQALPPR |
| 139108-nt | 123 | ATGGCCCTCCCTGTCACCGCCCTGCTGCTTCCGCTGGCTCTTCTGCTCCACGCCGCTC |
| Full CAR | | GGCCCCAAGTGCAACTCGTGGAATCTGGTGGAGGACTCGTGAAACCTGGAGGATCATT |
| | | GAGACTGTCATGCGCGGCCTCGGGATTCACGTTCTCCGATTACTACATGAGCTGGATT |
| | | CGCCAGGCTCCGGGGAAGGGACTGGAATGGGTGTCCTACATTTCCTCATCCGGCTCCA |
| | | CCATCTACTACGCGGACTCCGTGAAGGGGAGATTCACCATTAGCCGCGATAACGCCAA |
| | | GAACAGCCTGTACCTTCAGATGAACTCCCTGCGGGCTGAAGATACTGCCGTCTACTAC |
| | | TGCGCAAGGGAGAGCGGAGATGGGATGGACGTCTGGGGACAGGGTACCACTGTGACCG |
| | | TGTCGTCGGCCTCCGGCGGAGGGGGTTCGGGTGGAAGGGCCAGCGGCGGCGGAGGCAG |
| | | CGACATCCAGATGACCCAGTCCCCCTCATCGCTGTCCGCCTCCGTGGGCGACCGCGTC |
| | | ACCATCACATGCCGGGCCTCACAGTCGATCTCCTCCTACCTCAATTGGTATCAGCAGA |
| | | AGCCCGGAAAGGCCCCTAAGCTTCTGATCTACGCAGCGTCCTCCCTGCAATCCGGGGT |
| | | CCCATCTCGGTTCTCCGGCTCGGGCAGCGGTACCGACTTCACTCTGACCATCTCGAGC |
| | | CTGCAGCCGGAGGACTTCGCCACTTACTACTGTCAGCAAAGCTACACCCTCGCGTTTG |
| | | GCCAGGGCACCAAAGTGGACATCAAGACCACTACCCCAGCACCGAGGCCACCCACCCC |
| | | GGCTCCTACCATCGCCTCCCAGCCTCTGTCCCTGCGTCCGGAGGCATGTAGACCCGCA |
| | | GCTGGTGGGGCCGTGCATACCCGGGGTCTTGACTTCGCCTGCGATATCTACATTTGGG |
| | | CCCCTCTGGCTGGTACTTGCGGGGTCCTGCTGCTTTCACTCGTGATCACTCTTTACTG |
| | | TAAGCGCGGTCGGAAGAAGCTGCTGTACATCTTTAAGCAACCCTTCATGAGGCCTGTG |
| | | CAGACTACTCAAGAGGAGGACGGCTGTTCATGCCGGTTCCCAGAGGAGGAGGAAGGCG |
| | | GCTGCGAACTGCGCGTGAAATTCAGCCGCAGCGCAGATGCTCCAGCCTACAAGCAGGG |
| | | GCAGAACCAGCTCTACAACGAACTCAATCTTGGTCGGAGAGAGGAGTACGACGTGCTG |
| | | GACAAGCGGAGAGGACGGGACCCAGAAATGGGCGGGAAGCCGCGCAGAAAGAATCCCC |
| | | AAGAGGGCCTGTACAACGAGCTCCAAAAGGATAAGATGGCAGAAGCCTATAGCGAGAT |
| | | TGGTATGAAAGGGGAACGCAGAAGAGGCAAAGGCCACGACGGACTGTACCAGGGACTC |
| | | AGCACCGCCACCAAGGACACCTATGACGCTCTTCACATGCAGGCCCTGCCGCCTCGG |
| 139110 | | |
| 139110-aa | 50 | QVQLVQSGGGLVKPGGSLRLSCAASGFTFSDYYMSWIRQAPGKGLEWVSYISSSGNTI |
| ScFv domain | | YYADSVKGRFTISRDNAKNSLYLQMNSLRAEDTAVYYCARSTMVREDYWGQGTLVTVS |
| | | SASGGGGSGGRASGGGGSDIVLTQSPLSLPVTLGQPASISCKSSESLVHNSGKTYLNW |
| | | FHQRPGQSPRRLIYEVSNRDSGVPDRFTGSGSGTDFTLKISRVEAEDVGVYYCMQGTH |
| | | WPGTFGQGTKLEIK |
| 139110-nt | 65 | CAAGTGCAACTGGTGCAAAGCGGAGGAGGATTGGTCAAACCCGGAGGAAGCCTGAGAC |
| ScFv domain | | TGTCATGCGCGGCCTCTGGATTCACCTTCTCCGATTACTACATGTCATGGATCAGACA |
| | | GGCCCCGGGGAAGGGCCTCGAATGGGTGTCCTACATCTCGTCCTCCGGGAACACCATC |
| | | TACTACGCCGACAGCGTGAAGGGCCGCTTTACCATTTCCCGCGACAACGCAAAGAACT |
| | | CGCTGTACCTTCAGATGAATTCCCTGCGGGCTGAAGATACCGCGGTGTACTATTGCGC |
| | | CCGGTCCACTATGGTCCGGGAGGACTACTGGGGACAGGGCACACTCGTGACCGTGTCC |
| | | AGCGCGAGCGGGGGTGGAGGCAGCGGTGGACGCGCCTCCGGCGGCGGCGGTTCAGACA |
| | | TCGTGCTGACTCAGTCGCCCCTGTCGCTGCCGGTCACCCTGGGCCAACCGGCCTCAAT |
| | | TAGCTGCAAGTCCTCGGAGAGCCTGGTGCACAACTCAGGAAAGACTTACCTGAACTGG |
| | | TTCCATCAGCGGCCTGGACAGTCCCCACGGAGGCTCATCTATGAAGTGTCCAACAGGG |
| | | ATTCGGGGGTGCCCGACCGCTTCACTGGCTCCGGGTCCGGCACCGACTTCACCTTGAA |
| | | AATCTCCAGAGTGGAAGCCGAGGACGTGGGCGTGTACTACTGTATGCAGGGTACCCAC |
| | | TGGCCTGGAACCTTTGGACAAGGAACTAAGCTCGAGATTAAG |
| 139110-aa | 80 | QVQLVQSGGGLVKPGGSLRLSCAASGFTFSDYYMSWIRQAPGKGLEWVSYISSSGNTI |
| VH | | YYADSVKGRFTISRDNAKNSLYLQMNSLRAEDTAVYYCARSTMVREDYWGQGTLVTVS |
| | | S |
| 139110-aa | 95 | DIVLTQSPLSLPVTLGQPASISCKSSESLVHNSGKTYLNWFHQRPGQSPRRLIYEVSN |
| VL | | RDSGVPDRFTGSGSGTDFTLKISRVEAEDVGVYYCMQGTHWPGTFGQGTKLEIK |
| 139110-aa | 110 | MALPVTALLLPLALLLHAARPQVQLVQSGGGLVKPGGSLRLSCAASGFTFSDYYMSWI |
| Full CAR | | RQAPGKGLEWVSYISSSGNTIYYADSVKGRFTISRDNAKNSLYLQMNSLRAEDTAVYY |
| | | CARSTMVREDYWGQGTLVTVSSASGGGGSGGRASGGGGSDIVLTQSPLSLPVTLGQPA |
| | | SISCKSSESLVHNSGKTYLNWFHQRPGQSPRRLIYEVSNRDSGVPDRFTGSGSGTDFT |
| | | LKISRVEAEDVGVYYCMQGTHWPGTFGQGTKLEIKTTTPAPRPPTPAPTIASQPLSLR |
| | | PEACRPAAGGAVHTRGLDFACDIYIWAPLAGTCGVLLLSLVITLYCKRGRKKLLYIFK |
| | | QPFMRPVQTTQEEDGCSCRFPEEEEGGCELRVKFSRSADAPAYKQGQNQLYNELNLCR |
| | | REEYDVLDKRRGRDPEMGGKPRRKNPQEGLYNELQKDKMAEAYSEIGMKGERRRGKGH |
| | | DGLYQGLSTATKDTYDALHMQALPPR |
| 139110-nt | 125 | ATGGCCCTCCCTGTCACCGCCCTGCTGCTTCCGCTGGCTCTTCTGCTCCACGCCGCTC |
| Full CAR | | GGCCCCAAGTGCAACTGGTGCAAAGCGGAGGAGGATTGGTCAAACCCGGAGGAAGCCT |
| | | GAGACTGTCATGCGCGGCCTCTGGATTCACCTTCTCCGATTACTACATGTCATGGATC |
| | | AGACAGGCCCCGGGGAAGGGCCTCGAATGGGTGTCCTACATCTCGTCCTCCGGGAACA |
| | | CCATCTACTACGCCGACAGCGTGAAGGGCCGCTTTACCATTTCCCGCGACAACGCAAA |
| | | GAACTCGCTGTACCTTCAGATGAATTCCCTGCGGGCTGAAGATACCGCGGTGTACTAT |
| | | TGCGCCCGGTCCACTATGGTCCGGGAGGACTACTGGGGACAGGGCACACTCGTGACCG |
| | | TGTCCAGCGCGAGCGGGGGTGGAGGCAGCGGTGGACGCGCCTCCGGCGGCGGCGGTTC |
| | | AGACATCGTGCTGACTCAGTCGCCCCTGTCGCTGCCGGTCACCCTGGGCCAACCGGCC |
| | | TCAATTAGCTGCAAGTCCTCGGAGAGCCTGGTGCACAACTCAGGAAAGACTTACCTGA |
| | | ACTGGTTCCATCAGCGGCCTGGACAGTCCCCACGGAGGCTCATCTATGAAGTGTCCAA |
| | | CAGGGATTCGGGGGTGCCCGACCGCTTCACTGGCTCCGGGTCCGGCACCGACTTCACC |
| | | TTGAAAATCTCCAGAGTGGAAGCCGAGGACGTGGGCGTGTACTACTGTATGCAGGGTA |
| | | CCCACTGGCCTGGAACCTTTGGACAAGGAACTAAGCTCGAGATTAAGACCACTACCCC |
| | | AGCACCGAGGCCACCCACCCCGGCTCCTACCATCGCCTCCCAGCCTCTGTCCCTGCGT |
| | | CCGGAGGCATGTAGACCCGCAGCTGGTGGGGCCGTGCATACCCGGGGTCTTGACTTCG |
| | | CCTGCGATATCTACATTTGGGCCCCTCTGGCTGGTACTTGCGGGGTCCTGCTGCTTTC |
| | | ACTCGTGATCACTCTTTACTGTAAGCGCGGTCGGAAGAAGCTGCTGTACATCTTTAAG |
| | | CAACCCTTCATGAGGCCTGTGCAGACTACTCAAGAGGAGGACGGCTGTTCATGCCGGT |
| | | TCCCAGAGGAGGAGGAAGGCGGCTGCGAACTGCGCGTGAAATTCAGCCGCAGCGCAGA |
| | | TGCTCCAGCCTACAAGCAGGGGCAGAACCAGCTCTACAACGAACTCAATCTTGGTCGG |
| | | AGAGAGGAGTACGACGTGCTGGACAAGCGGAGAGGACGGGACCCAGAAATGGGCGGGA |
| | | AGCCGCGCAGAAAGAATCCCCAAGAGGGCCTGTACAACGAGCTCCAAAAGGATAAGAT |
| | | GGCAGAAGCCTATAGCGAGATTGGTATGAAAGGGGAACGCAGAAGAGGCAAAGGCCAC |
| | | GACGGACTGTACCAGGGACTCAGCACCGCCACCAAGGACACCTATGACGCTCTTCACA |
| | | TGCAGGCCCTGCCGCCTCGG |
| 139112 | | |
| 139112-aa | 51 | QVQLVESGGGLVQPGGSLRLSCAVSGFALSNHGMSWVRRAPGKGLEWVSGIVYSGSTY |
| ScFv domain | | YAASVKGRFTISRDNSRNTLYLQMNSLRPEDTAIYYCSAHGGESDVWGQGTTVTVSSA |
| | | SGGGGSGGRASGGGGSDIRLTQSPSPLSASVGDRVTITCQASEDINKFLNWYHQTPGK |
| | | APKLLIYDASTLQTGVPSRFSGSGSGTDFTLTINSLQPEDIGTYYCQQYESLPLTFGG |
| | | GTKVEIK |
| 139112-nt | 66 | CAAGTGCAACTCGTGGAATCTGGTGGAGGACTCGTGCAACCCGGTGGAAGCCTTAGGC |
| ScFv domain | | TGTCGTGCGCCGTCAGCGGGTTTGCTCTGAGCAACCATGGAATGTCCTGGGTCCGCCG |
| | | GGCACCGGGAAAAGGGCTGGAATGGGTGTCCGGCATCGTGTACAGCGGGTCAACCTAT |
| | | TACGCCGCGTCCGTGAAGGGCAGATTCACTATCTCAAGAGACAACAGCCGGAACACCC |
| | | TGTACTTGCAAATGAATTCCCTGCGCCCCGAGGACACCGCCATCTACTACTGCTCCGC |
| | | CCACGGAGGAGAGTCGGACGTGTGGGGCCAGGGAACGACTGTGACTGTGTCCAGCGCA |
| | | TCAGGAGGGGGTGGTTCGGGCGGCCGGGCCTCGGGGGGAGGAGGTTCCGACATTCGGC |
| | | TGACCCAGTCCCCGTCCCCACTGTCGGCCTCCGTCGGCGACCGCGTGACCATCACTTG |
| | | TCAGGCGTCCGAGGACATTAACAAGTTCCTGAACTGGTACCACCAGACCCCTGGAAAG |
| | | GCCCCCAAGCTGCTGATCTACGATGCCTCGACCCTTCAAACTGGAGTGCCTAGCCGGT |
| | | TCTCCGGGTCCGGCTCCGGCACTGATTTCACTCTGACCATCAACTCATTGCAGCCGGA |
| | | AGATATCGGGACCTACTATTGCCAGCAGTACGAATCCCTCCCGCTCACATTCGGCGGG |
| | | GGAACCAAGGTCGAGATTAAG |
| 139112-aa | 81 | QVQLVESGGGLVQPGGSLRLSCAVSGFALSNHGMSWVRRAPGKGLEWVSGIVYSGSTY |
| VH | | YAASVKGRFTISRDNSRNTLYLQMNSLRPEDTAIYYCSAHGGESDVWGQGTTVTVSS |
| 139112-aa | 96 | DIRLTQSPSPLSASVGDRVTITCQASEDINKFLNWYHQTPGKAPKLLIYDASTLQTGV |
| VL | | PSRFSGSGSGTDFTLTINSLQPEDIGTYYCQQYESLPLTFGGGTKVEIK |
| 139112-aa | 111 | MALPVTALLLPLALLLHAARPQVQLVESGGGLVQPGGSLRLSCAVSGFALSNHGMSWV |
| Full CAR | | RRAPGKGLEWVSGIVYSGSTYYAASVKGRFTISRDNSRNTLYLQMNSLRPEDTAIYYC |
| | | SAHGGESDVWGQGTTVTVSSASGGGGSGGRASGGGGSDIRLTQSPSPLSASVGDRVTI |
| | | TCQASEDINKFLNWYHQTPGKAPKLLIYDASTLQTGVPSRFSGSGSGTDFTLTINSLQ |
| | | PEDIGTYYCQQYESLPLTFGGGTKVEIKTTTPAPRPPTPAPTIASQPLSLRPEACRPA |
| | | AGGAVHTRGLDFACDIYIWAPLAGTCGVLLLSLVITLYCKRGRKKLLYIFKQPFMRPV |
| | | QTTQEEDGCSCRFPEEEEGGCELRVKFSRSADAPAYKQGQNQLYNELNLGRREEYDVL |
| | | DKRRGRDPEMGGKPRRKNPQEGLYNELQKDKMAEAYSEIGMKGERRRGKGHDGLYQGL |
| | | STATKDTYDALHMQALPPR |
| 139112-nt | 126 | ATGGCCCTCCCTGTCACCGCCCTGCTGCTTCCGCTGGCTCTTCTGCTCCACGCCGCTC |
| Full CAR | | GGCCCCAAGTGCAACTCGTGGAATCTGGTGGAGGACTCGTGCAACCCGGTGGAAGCCT |
| | | TAGGCTGTCGTGCGCCGTCAGCGGGTTTGCTCTGAGCAACCATGGAATGTCCTGGGTC |
| | | CGCCGGGCACCGGGAAAAGGGCTGGAATGGGTGTCCGGCATCGTGTACAGCGGGTCAA |
| | | CCTATTACGCCGCGTCCGTGAAGGGCAGATTCACTATCTCAAGAGACAACAGCCGGAA |
| | | CACCCTGTACTTGCAAATGAATTCCCTGCGCCCCGAGGACACCGCCATCTACTACTGC |
| | | TCCGCCCACGGAGGAGAGTCGGACGTGTGGGGCCAGGGAACGACTGTGACTGTGTCCA |
| | | GCGCATCAGGAGGGGGTGGTTCGGGCGGCCGGGCCTCGGGGGGAGGAGGTTCCGACAT |
| | | TCGGCTGACCCAGTCCCCGTCCCCACTGTCGGCCTCCGTCGGCGACCGCGTGACCATC |
| | | ACTTGTCAGGCGTCCGAGGACATTAACAAGTTCCTGAACTGGTACCACCAGACCCCTG |
| | | GAAAGGCCCCCAAGCTGCTGATCTACGATGCCTCGACCCTTCAAACTGGAGTGCCTAG |
| | | CCGGTTCTCCGGGTCCGGCTCCGGCACTGATTTCACTCTGACCATCAACTCATTGCAG |
| | | CCGGAAGATATCGGGACCTACTATTGCCAGCAGTACGAATCCCTCCCGCTCACATTCG |
| | | GCGGGGGAACCAAGGTCGAGATTAAGACCACTACCCCAGCACCGAGGCCACCCACCCC |
| | | GGCTCCTACCATCGCCTCCCAGCCTCTGTCCCTGCGTCCGGAGGCATGTAGACCCGCA |
| | | GCTGGTGGGGCCGTGCATACCCGGGGTCTTGACTTCGCCTGCGATATCTACATTTGGG |
| | | CCCCTCTGGCTGGTACTTGCGGGGTCCTGCTGCTTTCACTCGTGATCACTCTTTACTG |
| | | TAAGCGCGGTCGGAAGAAGCTGCTGTACATCTTTAAGCAACCCTTCATGAGGCCTGTG |
| | | CAGACTACTCAAGAGGAGGACGGCTGTTCATGCCGGTTCCCAGAGGAGGAGGAAGGCG |
| | | GCTGCGAACTGCGCGTGAAATTCAGCCGCAGCGCAGATGCTCCAGCCTACAAGCAGGG |
| | | GCAGAACCAGCTCTACAACGAACTCAATCTTGGTCGGAGAGAGGAGTACGACGTGCTG |
| | | GACAAGCGGAGAGGACGGGACCCAGAAATGGGCGGGAAGCCGCGCAGAAAGAATCCCC |
| | | AAGAGGGCCTGTACAACGAGCTCCAAAAGGATAAGATGGCAGAAGCCTATAGCGAGAT |
| | | TGGTATGAAAGGGGAACGCAGAAGAGGCAAAGGCCACGACGGACTGTACCAGGGACTC |
| | | AGCACCGCCACCAAGGACACCTATGACGCTCTTCACATGCAGGCCCTGCCGCCTCGG |
| 139113 | | |
| 139113-aa | 52 | EVQLVETGGGLVQPGGSLRLSCAVSGFALSNHGMSWVRRAPGKGLEWVSGIVYSGSTY |
| ScFv domain | | YAASVKGRFTISRDNSRNTLYLQMNSLRPEDTAIYYCSAHGGESDVWGQGTTVTVSSA |
| | | SGGGGSGGRASGGGGSETTLTQSPATLSVSPGERATLSCRASQSVGSNLAWYQQKPGQ |
| | | GPRLLIYGASTRATGIPARFSGSGSGTEFTLTISSLQPEDFAVYYCQQYNDWLPVTFG |
| | | QGTKVEIK |
| 139113-nt | 67 | GAAGTGCAATTGGTGGAAACTGGAGGAGGACTTGTGCAACCTGGAGGATCATTGCGGC |
| ScFv domain | | TCTCATGCGCTGTCTCCGGCTTCGCCCTGTCAAATCACGGGATGTCGTGGGTCAGACG |
| | | GGCCCCGGGAAAGGGTCTGGAATGGGTGTCGGGGATTGTGTACAGCGGCTCCACCTAC |
| | | TACGCCGCTTCGGTCAAGGGCCGCTTCACTATTTCACGGGACAACAGCCGCAACACCC |
| | | TCTATCTGCAAATGAACTCTCTCCGCCCGGAGGATACCGCCATCTACTACTGCTCCGC |
| | | ACACGGCGGCGAATCCGACGTGTGGGGACAGGGAACCACTGTCACCGTGTCGTCCGCA |
| | | TCCGGTGGCGGAGGATCGGGTGGCCGGGCCTCCGGGGGCGGCGGCAGCGAGACTACCC |
| | | TGACCCAGTCCCCTGCCACTCTGTCCGTGAGCCCGGGAGAGAGAGCCACCCTTAGCTG |
| | | CCGGGCCAGCCAGAGCGTGGGCTCCAACCTGGCCTGGTACCAGCAGAAGCCAGGACAG |
| | | GGTCCCAGGCTGCTGATCTACGGAGCCTCCACTCGCGCGACCGGCATCCCCGCGAGGT |
| | | TCTCCGGGTCGGGTTCCGGGACCGAGTTCACCCTGACCATCTCCTCCCTCCAACCGGA |
| | | GGACTTCGCGGTGTACTACTGTCAGCAGTACAACGATTGGCTGCCCGTGACATTTGGA |
| | | CAGGGGACGAAGGTGGAAATCAAA |
| 139113-aa | 82 | EVQLVETGGGLVQPGGSLRLSCAVSGFALSNHGMSWVRRAPGKGLEWVSGIVYSGSTY |
| VH | | YAASVKGRFTISRDNSRNTLYLQMNSLRPEDTAIYYCSAHGGESDVWGQGTTVTVSS |
| 139113-aa | 97 | ETTLTQSPATLSVSPGERATLSCRASQSVGSNLAWYQQKPGQGPRLLIYGASTRATGI |
| VL | | PARFSGSGSGTEFTLTISSLQPEDFAVYYCQQYNDWLPVTFGQGTKVEIK |
| 139113-aa | 112 | MALPVTALLLPLALLLHAARPEVQLVETGGGLVQPGGSLRLSCAVSGFALSNHGMSWV |
| Full CAR | | RRAPGKGLEWVSGIVYSGSTYYAASVKGRFTISRDNSRNTLYLQMNSLRPEDTAIYYC |
| | | SAHGGESDVWGQGTTVTVSSASGGGGSGGRASGGGGSETTLTQSPATLSVSPGERATL |
| | | SCRASQSVGSNLAWYQQKPGQGPRLLIYGASTRATGIPARFSGSGSGTEFTLTISSLQ |
| | | PEDFAVYYCQQYNDWLPVTFGQGTKVEIKTTTPAPRPPTPAPTIASQPLSLRPEACRP |
| | | AAGGAVHTRGLDFACDIYIWAPLAGTCGVLLLSLVITLYCKRGRKKLLYIFKQPFMRP |
| | | VQTTQEEDGCSCRFPEEEEGGCELRVKFSRSADAPAYKQGQNQLYNELNLGRREEYDV |
| | | LDKRRGRDPEMGGKPRRKNPQEGLYNELQKDKMAEAYSEIGMKGERRRGKGHDGLYQG |
| | | LSTATKDTYDALHMQALPPR |
| 139113-nt | 127 | ATGGCCCTCCCTGTCACCGCCCTGCTGCTTCCGCTGGCTCTTCTGCTCCACGCCGCTC |
| Full CAR | | GGCCCGAAGTGCAATTGGTGGAAACTGGAGGAGGACTTGTGCAACCTGGAGGATCATT |
| | | GCGGCTCTCATGCGCTGTCTCCGGCTTCGCCCTGTCAAATCACGGGATGTCGTGGGTC |
| | | AGACGGGCCCCGGGAAAGGGTCTGGAATGGGTGTCGGGGATTGTGTACAGCGGCTCCA |
| | | CCTACTACGCCGCTTCGGTCAAGGGCCGCTTCACTATTTCACGGGACAACAGCCGCAA |
| | | CACCCTCTATCTGCAAATGAACTCTCTCCGCCCGGAGGATACCGCCATCTACTACTGC |
| | | TCCGCACACGGCGGCGAATCCGACGTGTGGGGACAGGGAACCACTGTCACCGTGTCGT |
| | | CCGCATCCGGTGGCGGAGGATCGGGTGGCCGGGCCTCCGGGGGCGGCGGCAGCGAGAC |
| | | TACCCTGACCCAGTCCCCTGCCACTCTGTCCGTGAGCCCGGGAGAGAGAGCCACCCTT |
| | | AGCTGCCGGGCCAGCCAGAGCGTGGGCTCCAACCTGGCCTGGTACCAGCAGAAGCCAG |
| | | GACAGGGTCCCAGGCTGCTGATCTACGGAGCCTCCACTCGCGCGACCGGCATCCCCGC |
| | | GAGGTTCTCCGGGTCGGGTTCCGGGACCGAGTTCACCCTGACCATCTCCTCCCTCCAA |
| | | CCGGAGGACTTCGCGGTGTACTACTGTCAGCAGTACAACGATTGGCTGCCCGTGACAT |
| | | TTGGACAGGGGACGAAGGTGGAAATCAAAACCACTACCCCAGCACCGAGGCCACCCAC |
| | | CCCGGCTCCTACCATCGCCTCCCAGCCTCTGTCCCTGCGTCCGGAGGCATGTAGACCC |
| | | GCAGCTGGTGGGGCCGTGCATACCCGGGGTCTTGACTTCGCCTGCGATATCTACATTT |
| | | GGGCCCCTCTGGCTGGTACTTGCGGGGTCCTGCTGCTTTCACTCGTGATCACTCTTTA |
| | | CTGTAAGCGCGGTCGGAAGAAGCTGCTGTACATCTTTAAGCAACCCTTCATGAGGCCT |
| | | GTGCAGACTACTCAAGAGGAGGACGGCTGTTCATGCCGGTTCCCAGAGGAGGAGGAAG |
| | | GCGGCTGCGAACTGCGCGTGAAATTCAGCCGCAGCGCAGATGCTCCAGCCTACAAGCA |
| | | GGGGCAGAACCAGCTCTACAACGAACTCAATCTTGGTCGGAGAGAGGAGTACGACGTG |
| | | CTGGACAAGCGGAGAGGACGGGACCCAGAAATGGGCGGGAAGCCGCGCAGAAAGAATC |
| | | CCCAAGAGGGCCTGTACAACGAGCTCCAAAAGGATAAGATGGCAGAAGCCTATAGCGA |
| | | GATTGGTATGAAAGGGGAACGCAGAAGAGGCAAAGGCCACGACGGACTGTACCAGGGA |
| | | CTCAGCACCGCCACCAAGGACACCTATGACGCTCTTCACATGCAGGCCCTGCCGCCTC |
| | | GG |
| 139114 | | |
| 139114-aa | 53 | EVQLVESGGGLVQPGGSLRLSCAVSGFALSNHGMSWVRRAPGKGLEWVSGIVYSGSTY |
| ScFv domain | | YAASVKGRFTISRDNSRNTLYLQMNSLRPEDTAIYYCSAHGGESDVWGQGTTVTVSSA |
| | | SGGGGSGGRASGGGGSEIVLTQSPGTLSLSPGERATLSCRASQSIGSSSLAWYQQKPG |
| | | QAPRLLMYGASSRASGIPDRFSGSGSGTDFTLTISRLEPEDFAVYYCQQYAGSPPFTF |
| | | GQGTKVEIK |
| 139114-nt | 68 | GAAGTGCAATTGGTGGAATCTGGTGGAGGACTTGTGCAACCTGGAGGATCACTGAGAC |
| ScFv domain | | TGTCATGCGCGGTGTCCGGTTTTGCCCTGAGCAATCATGGGATGTCGTGGGTCCGGCG |
| | | CGCCCCCGGAAAGGGTCTGGAATGGGTGTCGGGTATCGTCTACTCCGGGAGCACTTAC |
| | | TACGCCGCGAGCGTGAAGGGCCGCTTCACCATTTCCCGCGATAACTCCCGCAACACCC |
| | | TGTACTTGCAAATGAACTCGCTCCGGCCTGAGGACACTGCCATCTACTACTGCTCCGC |
| | | ACACGGAGGAGAATCCGACGTGTGGGGCCAGGGAACTACCGTGACCGTCAGCAGCGCC |
| | | TCCGGCGGCGGGGGCTCAGGCGGACGGGCTAGCGGCGGCGGTGGCTCCGAGATCGTGC |
| | | TGACCCAGTCGCCTGGCACTCTCTCGCTGAGCCCCGGGGAAAGGGCAACCCTGTCCTG |
| | | TCGGGCCAGCCAGTCCATTGGATCATCCTCCCTCGCCTGGTATCAGCAGAAACCGGGA |
| | | CAGGCTCCGCGGCTGCTTATGTATGGGGCCAGCTCAAGAGCCTCCGGCATTCCCGACC |
| | | GGTTCTCCGGGTCCGGTTCCGGCACCGATTTCACCCTGACTATCTCGAGGCTGGAGCC |
| | | AGAGGACTTCGCCGTGTACTACTGCCAGCAGTACGCGGGGTCCCCGCCGTTCACGTTC |
| | | GGACAGGGAACCAAGGTCGAGATCAAG |
| 139114-aa | 83 | EVQLVESGGGLVQPGGSLRLSCAVSGFALSNHGMSWVRRAPGKGLEWVSGIVYSGSTY |
| VH | | YAASVKGRFTISRDNSRNTLYLQMNSLRPEDTAIYYCSAHGGESDVWGQGTTVTVSS |
| 139114-aa | 98 | EIVLTQSPGTLSLSPGERATLSCRASQSIGSSSLAWYQQKPGQAPRLLMYGASSRASG |
| VL | | IPDRFSGSGSGTDFTLTISRLEPEDFAVYYCQQYAGSPPFTFGQGTKVEIK |
| 139114-aa | 113 | MALPVTALLLPLALLLHAARPEVQLVESGGGLVQPGGSLRLSCAVSGFALSNHGMSWV |
| Full CAR | | RRAPGKGLEWVSGIVYSGSTYYAASVKGRFTISRDNSRNTLYLQMNSLRPEDTAIYYC |
| | | SAHGGESDVWGQGTTVTVSSASGGGGSGGRASGGGGSEIVLTQSPGTLSLSPGERATL |
| | | SCRASQSIGSSSLAWYQQKPGQAPRLLMYGASSRASGIPDRFSGSGSGTDFTLTISRL |
| | | EPEDFAVYYCQQYAGSPPFTFGQGTKVEIKTTTPAPRPPTPAPTIASQPLSLRPEACR |
| | | PAAGGAVHTRGLDFACDIYIWAPLAGTCGVLLLSLVITLYCKRGRKKLLYIFKQPFMR |
| | | PVQTTQEEDGCSCRFPEEEEGGCELRVKFSRSADAPAYKQGQNQLYNELNLGRREEYD |
| | | VLDKRRGRDPEMGGKPRRKNPQEGLYNELQKDKMAEAYSEIGMKGERRRGKGHDGLYQ |
| | | GLSTATKDTYDALHMQALPPR |
| 139114-nt | 128 | ATGGCCCTCCCTGTCACCGCCCTGCTGCTTCCGCTGGCTCTTCTGCTCCACGCCGCTC |
| Full CAR | | GGCCCGAAGTGCAATTGGTGGAATCTGGTGGAGGACTTGTGCAACCTGGAGGATCACT |
| | | GAGACTGTCATGCGCGGTGTCCGGTTTTGCCCTGAGCAATCATGGGATGTCGTGGGTC |
| | | CGGCGCGCCCCCGGAAAGGGTCTGGAATGGGTGTCGGGTATCGTCTACTCCGGGAGCA |
| | | CTTACTACGCCGCGAGCGTGAAGGGCCGCTTCACCATTTCCCGCGATAACTCCCGCAA |
| | | CACCCTGTACTTGCAAATGAACTCGCTCCGGCCTGAGGACACTGCCATCTACTACTGC |
| | | TCCGCACACGGAGGAGAATCCGACGTGTGGGGCCAGGGAACTACCGTGACCGTCAGCA |
| | | GCGCCTCCGGCGGCGGGGGCTCAGGCGGACGGGCTAGCGGCGGCGGTGGCTCCGAGAT |
| | | CGTGCTGACCCAGTCGCCTGGCACTCTCTCGCTGAGCCCCGGGGAAAGGGCAACCCTG |
| | | TCCTGTCGGGCCAGCCAGTCCATTGGATCATCCTCCCTCGCCTGGTATCAGCAGAAAC |
| | | CGGGACAGGCTCCGCGGCTGCTTATGTATGGGGCCAGCTCAAGAGCCTCCGGCATTCC |
| | | CGACCGGTTCTCCGGGTCCGGTTCCGGCACCGATTTCACCCTGACTATCTCGAGGCTG |
| | | GAGCCAGAGGACTTCGCCGTGTACTACTGCCAGCAGTACGCGGGGTCCCCGCCGTTCA |
| | | CGTTCGGACAGGGAACCAAGGTCGAGATCAAGACCACTACCCCAGCACCGAGGCCACC |
| | | CACCCCGGCTCCTACCATCGCCTCCCAGCCTCTGTCCCTGCGTCCGGAGGCATGTAGA |
| | | CCCGCAGCTGGTGGGGCCGTGCATACCCGGGGTCTTGACTTCGCCTGCGATATCTACA |
| | | TTTGGGCCCCTCTGGCTGGTACTTGCGGGGTCCTGCTGCTTTCACTCGTGATCACTCT |
| | | TTACTGTAAGCGCGGTCGGAAGAAGCTGCTGTACATCTTTAAGCAACCCTTCATGAGG |
| | | CCTGTGCAGACTACTCAAGAGGAGGACGGCTGTTCATGCCGGTTCCCAGAGGAGGAGG |
| | | AAGGCGGCTGCGAACTGCGCGTGAAATTCAGCCGCAGCGCAGATGCTCCAGCCTACAA |
| | | GCAGGGGCAGAACCAGCTCTACAACGAACTCAATCTTGGTCGGAGAGAGGAGTACGAC |
| | | GTGCTGGACAAGCGGAGAGGACGGGACCCAGAAATGGGCGGGAAGCCGCGCAGAAAGA |
| | | ATCCCCAAGAGGGCCTGTACAACGAGCTCCAAAAGGATAAGATGGCAGAAGCCTATAG |
| | | CGAGATTGGTATGAAAGGGGAACGCAGAAGAGGCAAAGGCCACGACGGACTGTACCAG |
| | | GGACTCAGCACCGCCACCAAGGACACCTATGACGCTCTTCACATGCAGGCCCTGCCGC |
| | | CTCGG |
| 149362 | | |
| 149362-aa | 129 | QVQLQESGPGLVKPSETLSLTCTVSGGSISSSYYYWGWIRQPPGKGLEWIGSIYYSGS |
| ScFv domain | | AYYNPSLKSRVTISVDTSKNQFSLRLSSVTAADTAVYYCARHWQEWPDAFDIWGQGTM |
| | | VTVSSGGGGSGGGGSGGGGSETTLTQSPAFMSATPGDKVIISCKASQDIDDAMNWYQQ |
| | | KPGEAPLFIIQSATSPVPGIPPRFSGSGFGTDFSLTINNIESEDAAYYFCLQHDNFPL |
| | | TFGQGTKLEIK |
| 149362-nt ScFv | 150 | CAAGTGCAGCTTCAGGAAAGCGGACCGGGCCTGGTCAAGCCATCCGAAACTCTCTCCC |
| domain | | TGACTTGCACTGTGTCTGGCGGTTCCATCTCATCGTCGTACTACTACTGGGGCTGGAT |
| | | TAGGCAGCCGCCCGGAAAGGGACTGGAGTGGATCGGAAGCATCTACTATTCCGGCTCG |
| | | GCGTACTACAACCCTAGCCTCAAGTCGAGAGTGACCATCTCCGTGGATACCTCCAAGA |
| | | ACCAGTTTTCCCTGCGCCTGAGCTCCGTGACCGCCGCTGACACCGCCGTGTACTACTG |
| | | TGCTCGGCATTGGCAGGAATGGCCCGATGCCTTCGACATTTGGGGCCAGGGCACTATG |
| | | GTCACTGTGTCATCCGGGGGTGGAGGCAGCGGGGGAGGAGGGTCCGGGGGGGGAGGTT |
| | | CAGAGACAACCTTGACCCAGTCACCCGCATTCATGTCCGCCACTCCGGGAGACAAGGT |
| | | CATCATCTCGTGCAAAGCGTCCCAGGATATCGACGATGCCATGAATTGGTACCAGCAG |
| | | AAGCCTGGCGAAGCGCCGCTGTTCATTATCCAATCCGCAACCTCGCCCGTGCCTGGAA |
| | | TCCCACCGCGGTTCAGCGGCAGCGGTTTCGGAACCGACTTTTCCCTGACCATTAACAA |
| | | CATTGAGTCCGAGGACGCCGCCTACTACTTCTGCCTGCAACACGACAACTTCCCTCTC |
| | | ACGTTCGGCCAGGGAACCAAGCTGGAAATCAAG |
| 149362-aa VH | 171 | QVQLQESGPGLVKPSETLSLTCTVSGGSISSSYYYWGWIRQPPGKGLEWIGSIYYSGS |
| | | AYYNPSLKSRVTISVDTSKNQFSLRLSSVTAADTAVYYCARHWQEWPDAFDIWGQGTM |
| | | VTVSS |
| 149362-aa VL | 192 | ETTLTQSPAFMSATPGDKVIISCKASQDIDDAMNWYQQKPGEAPLFIIQSATSPVPGI |
| | | PPRFSGSGFGTDFSLTINNIESEDAAYYFCLQHDNFPLTFGQGTKLEIK |
| 149362-aa Full | 213 | MALPVTALLLPLALLLHAARPQVQLQESGPGLVKPSETLSLTCTVSGGSISSSYYYWG |
| CAR | | WIRQPPGKGLEWIGSIYYSGSAYYNPSLKSRVTISVDTSKNQFSLRLSSVTAADTAVY |
| | | YCARHWQEWPDAFDIWGQGTMVTVSSGGGGSGGGGSGGGGSETTLTQSPAFMSATPGD |
| | | KVIISCKASQDIDDAMNWYQQKPGEAPLFIIQSATSPVPGIPPRFSGSGFGTDFSLTI |
| | | NNIESEDAAYYFCLQHDNFPLTFGQGTKLEIKTTTPAPRPPTPAPTIASQPLSLRPEA |
| | | CRPAAGGAVHTRGLDFACDIYIWAPLAGTCGVLLLSLVITLYCKRGRKKLLYIFKQPF |
| | | MRPVQTTQEEDGCSCRFPEEEEGGCELRVKFSRSADAPAYKQGQNQLYNELNLGRREE |
| | | YDVLDKRRGRDPEMGGKPRRKNPQEGLYNELQKDKMAEAYSEIGMKGERRRGKGHDGL |
| | | YQGLSTATKDTYDALHMQALPPR |
| 149362-nt | 234 | ATGGCCCTCCCTGTCACCGCCCTGCTGCTTCCGCTGGCTCTTCTGCTCCACGCCGCTC |
| Full CAR | | GGCCCCAAGTGCAGCTTCAGGAAAGCGGACCGGGCCTGGTCAAGCCATCCGAAACTCT |
| | | CTCCCTGACTTGCACTGTGTCTGGCGGTTCCATCTCATCGTCGTACTACTACTGGGGC |
| | | TGGATTAGGCAGCCGCCCGGAAAGGGACTGGAGTGGATCGGAAGCATCTACTATTCCG |
| | | GCTCGGCGTACTACAACCCTAGCCTCAAGTCGAGAGTGACCATCTCCGTGGATACCTC |
| | | CAAGAACCAGTTTTCCCTGCGCCTGAGCTCCGTGACCGCCGCTGACACCGCCGTGTAC |
| | | TACTGTGCTCGGCATTGGCAGGAATGGCCCGATGCCTTCGACATTTGGGGCCAGGGCA |
| | | CTATGGTCACTGTGTCATCCGGGGGTGGAGGCAGCGGGGGAGGAGGGTCCGGGGGGGG |
| | | AGGTTCAGAGACAACCTTGACCCAGTCACCCGCATTCATGTCCGCCACTCCGGGAGAC |
| | | AAGGTCATCATCTCGTGCAAAGCGTCCCAGGATATCGACGATGCCATGAATTGGTACC |
| | | AGCAGAAGCCTGGCGAAGCGCCGCTGTTCATTATCCAATCCGCAACCTCGCCCGTGCC |
| | | TGGAATCCCACCGCGGTTCAGCGGCAGCGGTTTCGGAACCGACTTTTCCCTGACCATT |
| | | AACAACATTGAGTCCGAGGACGCCGCCTACTACTTCTGCCTGCAACACGACAACTTCC |
| | | CTCTCACGTTCGGCCAGGGAACCAAGCTGGAAATCAAGACCACTACCCCAGCACCGAG |
| | | GCCACCCACCCCGGCTCCTACCATCGCCTCCCAGCCTCTGTCCCTGCGTCCGGAGGCA |
| | | TGTAGACCCGCAGCTGGTGGGGCCGTGCATACCCGGGGTCTTGACTTCGCCTGCGATA |
| | | TCTACATTTGGGCCCCTCTGGCTGGTACTTGCGGGGTCCTGCTGCTTTCACTCGTGAT |
| | | CACTCTTTACTGTAAGCGCGGTCGGAAGAAGCTGCTGTACATCTTTAAGCAACCCTTC |
| | | ATGAGGCCTGTGCAGACTACTCAAGAGGAGGACGGCTGTTCATGCCGGTTCCCAGAGG |
| | | AGGAGGAAGGCGGCTGCGAACTGCGCGTGAAATTCAGCCGCAGCGCAGATGCTCCAGC |
| | | CTACAAGCAGGGGCAGAACCAGCTCTACAACGAACTCAATCTTGGTCGGAGAGAGGAG |
| | | TACGACGTGCTGGACAAGCGGAGAGGACGGGACCCAGAAATGGGCGGGAAGCCGCGCA |
| | | GAAAGAATCCCCAAGAGGGCCTGTACAACGAGCTCCAAAAGGATAAGATGGCAGAAGC |
| | | CTATAGCGAGATTGGTATGAAAGGGGAACGCAGAAGAGGCAAAGGCCACGACGGACTG |
| | | TACCAGGGACTCAGCACCGCCACCAAGGACACCTATGACGCTCTTCACATGCAGGCCC |
| | | TGCCGCCTCGG |
| 149363 | | |
| 149363-aa | 130 | VNLRESGPALVKPTQTLTLTCTFSGFSLRTSGMCVSWIRQPPGKALEWLARIDWDEDK |
| ScFv domain | | FYSTSLKTRLTISKDTSDNQVVLRMTNMDPADTATYYCARSGAGGTSATAFDIWGPGT |
| | | MVTVSSGGGGSGGGGSGGGGSDIQMTQSPSSLSASVGDRVTITCRASQDIYNNLAWFQ |
| | | LKPGSAPRSLMYAANKSQSGVPSRFSGSASGTDFTLTISSLQPEDFATYYCQHYYRFP |
| | | YSFGQGTKLEIK |
| 149363-nt ScFv | 151 | CAAGTCAATCTGCGCGAATCCGGCCCCGCCTTGGTCAAGCCTACCCAGACCCTCACTC |
| domain | | TGACCTGTACTTTCTCCGGCTTCTCCCTGCGGACTTCCGGGATGTGCGTGTCCTGGAT |
| | | CAGACAGCCTCCGGGAAAGGCCCTGGAGTGGCTCGCTCGCATTGACTGGGATGAGGAC |
| | | AAGTTCTACTCCACCTCACTCAAGACCAGGCTGACCATCAGCAAAGATACCTCTGACA |
| | | ACCAAGTGGTGCTCCGCATGACCAACATGGACCCAGCCGACACTGCCACTTACTACTG |
| | | CGCGAGGAGCGGAGCGGGCGGAACCTCCGCCACCGCCTTCGATATTTGGGGCCCGGGT |
| | | ACCATGGTCACCGTGTCAAGCGGAGGAGGGGGGTCCGGGGGCGGCGGTTCCGGGGGAG |
| | | GCGGATCGGACATTCAGATGACTCAGTCACCATCGTCCCTGAGCGCTAGCGTGGGCGA |
| | | CAGAGTGACAATCACTTGCCGGGCATCCCAGGACATCTATAACAACCTTGCGTGGTTC |
| | | CAGCTGAAGCCTGGTTCCGCACCGCGGTCACTTATGTACGCCGCCAACAAGAGCCAGT |
| | | CGGGAGTGCCGTCCCGGTTTTCCGGTTCGGCCTCGGGAACTGACTTCACCCTGACGAT |
| | | CTCCAGCCTGCAACCCGAGGATTTCGCCACCTACTACTGCCAGCACTACTACCGCTTT |
| | | CCCTACTCGTTCGGACAGGGAACCAAGCTGGAAATCAAG |
| 149363-aa VH | 172 | QVNLRESGPALVKPTQTLTLTCTFSGFSLRTSGMCVSWIRQPPGKALEWLARIDWDED |
| | | KFYSTSLKTRLTISKDTSDNQVVLRMTNMDPADTATYYCARSGAGGTSATAFDIWGPG |
| | | TMVTVSS |
| 149363-aa VL | 193 | DIQMTQSPSSLSASVGDRVTITCRASQDIYNNLAWFQLKPGSAPRSLMYAANKSQSGV |
| | | PSRFSGSASGTDFTLTISSLQPEDFATYYCQHYYRFPYSFGQGTKLEIK |
| 149363-aa Full | 214 | MALPVTALLLPLALLLHAARPQVNLRESGPALVKPTQTLTLTCTFSGFSLRTSGMCVS |
| CAR | | WIRQPPGKALEWLARIDWDEDKFYSTSLKTRLTISKDTSDNQVVLRMTNMDPADTATY |
| | | YCARSGAGGTSATAFDIWGPGTMVTVSSGGGGSGGGGSGGGGSDIQMTQSPSSLSASV |
| | | GDRVTITCRASQDIYNNLAWFQLKPGSAPRSLMYAANKSQSGVPSRFSGSASGTDFTL |
| | | TISSLQPEDFATYYCQHYYRFPYSFGQGTKLEIKTTTPAPRPPTPAPTIASQPLSLRP |
| | | EACRPAAGGAVHTRGLDFACDIYIWAPLAGTCGVLLLSLVITLYCKRGRKKLLYIFKQ |
| | | PFMRPVQTTQEEDGCSCRFPEEEEGGCELRVKFSRSADAPAYKQGQNQLYNELNLGRR |
| | | EEYDVLDKRRGRDPEMGGKPRRKNPQEGLYNELQKDKMAEAYSEIGMKGERRRGKGHD |
| | | GLYQGLSTATKDTYDALHMQALPPR |
| 149363-nt | 235 | ATGGCCCTCCCTGTCACCGCCCTGCTGCTTCCGCTGGCTCTTCTGCTCCACGCCGCTC |
| Full CAR | | GGCCCCAAGTCAATCTGCGCGAATCCGGCCCCGCCTTGGTCAAGCCTACCCAGACCCT |
| | | CACTCTGACCTGTACTTTCTCCGGCTTCTCCCTGCGGACTTCCGGGATGTGCGTGTCC |
| | | TGGATCAGACAGCCTCCGGGAAAGGCCCTGGAGTGGCTCGCTCGCATTGACTGGGATG |
| | | AGGACAAGTTCTACTCCACCTCACTCAAGACCAGGCTGACCATCAGCAAAGATACCTC |
| | | TGACAACCAAGTGGTGCTCCGCATGACCAACATGGACCCAGCCGACACTGCCACTTAC |
| | | TACTGCGCGAGGAGCGGAGCGGGCGGAACCTCCGCCACCGCCTTCGATATTTGGGGCC |
| | | CGGGTACCATGGTCACCGTGTCAAGCGGAGGAGGGGGGTCCGGGGGCGGCGGTTCCGG |
| | | GGGAGGCGGATCGGACATTCAGATGACTCAGTCACCATCGTCCCTGAGCGCTAGCGTG |
| | | GGCGACAGAGTGACAATCACTTGCCGGGCATCCCAGGACATCTATAACAACCTTGCGT |
| | | GGTTCCAGCTGAAGCCTGGTTCCGCACCGCGGTCACTTATGTACGCCGCCAACAAGAG |
| | | CCAGTCGGGAGTGCCGTCCCGGTTTTCCGGTTCGGCCTCGGGAACTGACTTCACCCTG |
| | | ACGATCTCCAGCCTGCAACCCGAGGATTTCGCCACCTACTACTGCCAGCACTACTACC |
| | | GCTTTCCCTACTCGTTCGGACAGGGAACCAAGCTGGAAATCAAGACCACTACCCCAGC |
| | | ACCGAGGCCACCCACCCCGGCTCCTACCATCGCCTCCCAGCCTCTGTCCCTGCGTCCG |
| | | GAGGCATGTAGACCCGCAGCTGGTGGGGCCGTGCATACCCGGGGTCTTGACTTCGCCT |
| | | GCGATATCTACATTTGGGCCCCTCTGGCTGGTACTTGCGGGGTCCTGCTGCTTTCACT |
| | | CGTGATCACTCTTTACTGTAAGCGCGGTCGGAAGAAGCTGCTGTACATCTTTAAGCAA |
| | | CCCTTCATGAGGCCTGTGCAGACTACTCAAGAGGAGGACGGCTGTTCATGCCGGTTCC |
| | | CAGAGGAGGAGGAAGGCGGCTGCGAACTGCGCGTGAAATTCAGCCGCAGCGCAGATGC |
| | | TCCAGCCTACAAGCAGGGGCAGAACCAGCTCTACAACGAACTCAATCTTGGTCGGAGA |
| | | GAGGAGTACGACGTGCTGGACAAGCGGAGAGGACGGGACCCAGAAATGGGCGGGAAGC |
| | | CGCGCAGAAAGAATCCCCAAGAGGGCCTGTACAACGAGCTCCAAAAGGATAAGATGGC |
| | | AGAAGCCTATAGCGAGATTGGTATGAAAGGGGAACGCAGAAGAGGCAAAGGCCACGAC |
| | | GGACTGTACCAGGGACTCAGCACCGCCACCAAGGACACCTATGACGCTCTTCACATGC |
| | | AGGCCCTGCCGCCTCGG |
| 149364 | | |
| 149364-aa | 131 | EVQLVESGGGLVKPGGSLRLSCAASGFTFSSYSMNWVRQAPGKGLEWVSSISSSSSYI |
| ScFv domain | | YYADSVKGRFTISRDNAKNSLYLQMNSLRAEDTAVYYCAKTIAAVYAFDIWGQGTTVT |
| | | VSSGGGGSGGGGSGGGGSEIVLTQSPLSLPVTPEEPASISCRSSQSLLHSNGYNYLDW |
| | | YLQKPGQSPQLLIYLGSNRASGVPDRFSGSGSGTDFTLKISRVEAEDVGVYYCMQALQ |
| | | TPYTFGQGTKLEIK |
| 149364-nt ScFv | 152 | GAAGTGCAGCTTGTCGAATCCGGGGGGGGACTGGTCAAGCCGGGCGGATCACTGAGAC |
| domain | | TGTCCTGCGCCGCGAGCGGCTTCACGTTCTCCTCCTACTCCATGAACTGGGTCCGCCA |
| | | AGCCCCCGGGAAGGGACTGGAATGGGTGTCCTCTATCTCCTCGTCGTCGTCCTACATC |
| | | TACTACGCCGACTCCGTGAAGGGAAGATTCACCATTTCCCGCGACAACGCAAAGAACT |
| | | CACTGTACTTGCAAATGAACTCACTCCGGGCCGAAGATACTGCTGTGTACTATTGCGC |
| | | CAAGACTATTGCCGCCGTCTACGCTTTCGACATCTGGGGCCAGGGAACCACCGTGACT |
| | | GTGTCGTCCGGTGGTGGTGGCTCGGGCGGAGGAGGAAGCGGCGGCGGGGGGTCCGAGA |
| | | TTGTGCTGACCCAGTCGCCACTGAGCCTCCCTGTGACCCCCGAGGAACCCGCCAGCAT |
| | | CAGCTGCCGGTCCAGCCAGTCCCTGCTCCACTCCAACGGATACAATTACCTCGATTGG |
| | | TACCTTCAGAAGCCTGGACAAAGCCCGCAGCTGCTCATCTACTTGGGATCAAACCGCG |
| | | CGTCAGGAGTGCCTGACCGGTTCTCCGGCTCGGGCAGCGGTACCGATTTCACCCTGAA |
| | | AATCTCCAGGGTGGAGGCAGAGGACGTGGGAGTGTATTACTGTATGCAGGCGCTGCAG |
| | | ACTCCGTACACATTTGGGCAGGGCACCAAGCTGGAGATCAAG |
| 149364-aa VH | 173 | EVQLVESGGGLVKPGGSLRLSCAASGFTFSSYSMNWVRQAPGKGLEWVSSISSSSSYI |
| | | YYADSVKGRFTISRDNAKNSLYLQMNSLRAEDTAVYYCAKTIAAVYAFDIWGQGTTVT |
| | | VSS |
| 149364-aa VL | 194 | EIVLTQSPLSLPVTPEEPASISCRSSQSLLHSNGYNYLDWYLQKPGQSPQLLIYLGSN |
| | | RASGVPDRFSGSGSGTDFTLKISRVEAEDVGVYYCMQALQTPYTFGQGTKLEIK |
| 149364-aa Full | 215 | MALPVTALLLPLALLLHAARPEVQLVESGGGLVKPGGSLRLSCAASGFTFSSYSMNWV |
| CAR | | RQAPGKGLEWVSSISSSSSYIYYADSVKGRFTISRDNAKNSLYLQMNSLRAEDTAVYY |
| | | CAKTIAAVYAFDIWGQGTTVTVSSGGGGSGGGGSGGGGSEIVLTQSPLSLPVTPEEPA |
| | | SISCRSSQSLLHSNGYNYLDWYLQKPGQSPQLLIYLGSNRASGVPDRFSGSGSGTDFT |
| | | LKISRVEAEDVGVYYCMQALQTPYTFGQGTKLEIKTTTPAPRPPTPAPTIASQPLSLR |
| | | PEACRPAAGGAVHTRGLDFACDIYIWAPLAGTCGVLLLSLVITLYCKRGRKKLLYIFK |
| | | QPFMRPVQTTQEEDGCSCRFPEEEEGGCELRVKFSRSADAPAYKQGQNQLYNELNLGR |
| | | REEYDVLDKRRGRDPEMGGKPRRKNPQEGLYNELQKDKMAEAYSEIGMKGERRRGKGH |
| | | DGLYQGLSTATKDTYDALHMQALPPR |
| 149364-nt | 236 | ATGGCCCTCCCTGTCACCGCCCTGCTGCTTCCGCTGGCTCTTCTGCTCCACGCCGCTC |
| Full CAR | | GGCCCGAAGTGCAGCTTGTCGAATCCGGGGGGGGACTGGTCAAGCCGGGCGGATCACT |
| | | GAGACTGTCCTGCGCCGCGAGCGGCTTCACGTTCTCCTCCTACTCCATGAACTGGGTC |
| | | CGCCAAGCCCCCGGGAAGGGACTGGAATGGGTGTCCTCTATCTCCTCGTCGTCGTCCT |
| | | ACATCTACTACGCCGACTCCGTGAAGGGAAGATTCACCATTTCCCGCGACAACGCAAA |
| | | GAACTCACTGTACTTGCAAATGAACTCACTCCGGGCCGAAGATACTGCTGTGTACTAT |
| | | TGCGCCAAGACTATTGCCGCCGTCTACGCTTTCGACATCTGGGGCCAGGGAACCACCG |
| | | TGACTGTGTCGTCCGGTGGTGGTGGCTCGGGCGGAGGAGGAAGCGGCGGCGGGGGGTC |
| | | CGAGATTGTGCTGACCCAGTCGCCACTGAGCCTCCCTGTGACCCCCGAGGAACCCGCC |
| | | AGCATCAGCTGCCGGTCCAGCCAGTCCCTGCTCCACTCCAACGGATACAATTACCTCG |
| | | ATTGGTACCTTCAGAAGCCTGGACAAAGCCCGCAGCTGCTCATCTACTTGGGATCAAA |
| | | CCGCGCGTCAGGAGTGCCTGACCGGTTCTCCGGCTCGGGCAGCGGTACCGATTTCACC |
| | | CTGAAAATCTCCAGGGTGGAGGCAGAGGACGTGGGAGTGTATTACTGTATGCAGGCGC |
| | | TGCAGACTCCGTACACATTTGGGCAGGGCACCAAGCTGGAGATCAAGACCACTACCCC |
| | | AGCACCGAGGCCACCCACCCCGGCTCCTACCATCGCCTCCCAGCCTCTGTCCCTGCGT |
| | | CCGGAGGCATGTAGACCCGCAGCTGGTGGGGCCGTGCATACCCGGGGTCTTGACTTCG |
| | | CCTGCGATATCTACATTTGGGCCCCTCTGGCTGGTACTTGCGGGGTCCTGCTGCTTTC |
| | | ACTCGTGATCACTCTTTACTGTAAGCGCGGTCGGAAGAAGCTGCTGTACATCTTTAAG |
| | | CAACCCTTCATGAGGCCTGTGCAGACTACTCAAGAGGAGGACGGCTGTTCATGCCGGT |
| | | TCCCAGAGGAGGAGGAAGGCGGCTGCGAACTGCGCGTGAAATTCAGCCGCAGCGCAGA |
| | | TGCTCCAGCCTACAAGCAGGGGCAGAACCAGCTCTACAACGAACTCAATCTTGGTCGG |
| | | AGAGAGGAGTACGACGTGCTGGACAAGCGGAGAGGACGGGACCCAGAAATGGGCGGGA |
| | | AGCCGCGCAGAAAGAATCCCCAAGAGGGCCTGTACAACGAGCTCCAAAAGGATAAGAT |
| | | GGCAGAAGCCTATAGCGAGATTGGTATGAAAGGGGAACGCAGAAGAGGCAAAGGCCAC |
| | | GACGGACTGTACCAGGGACTCAGCACCGCCACCAAGGACACCTATGACGCTCTTCACA |
| | | TGCAGGCCCTGCCGCCTCGG |
| 149365 | | |
| 149365-aa | 132 | EVQLVESGGGLVKPGGSLRLSCAASGFTFSDYYMSWIRQAPGKGLEWVSYISSSGSTI |
| ScFv domain | | YYADSVKGRFTISRDNAKNSLYLQMNSLRAEDTAVYYCARDLRGAFDIWGQGTMVTVS |
| | | SGGGGSGGGGSGGGGSSYVLTQSPSVSAAPGYTATISCGGNNIGTKSVHWYQQKPGQA |
| | | PLLVIRDDSVRPSKIPGRFSGSNSGNMATLTISGVQAGDEADFYCQVWDSDSEHVVFG |
| | | GGTKLTVL |
| 149365-nt ScFv | 153 | GAAGTCCAGCTCGTGGAGTCCGGCGGAGGCCTTGTGAAGCCTGGAGGTTCGCTGAGAC |
| domain | | TGTCCTGCGCCGCCTCCGGCTTCACCTTCTCCGACTACTACATGTCCTGGATCAGACA |
| | | GGCCCCGGGAAAGGGCCTGGAATGGGTGTCCTACATCTCGTCATCGGGCAGCACTATC |
| | | TACTACGCGGACTCAGTGAAGGGGCGGTTCACCATTTCCCGGGATAACGCGAAGAACT |
| | | CGCTGTATCTGCAAATGAACTCACTGAGGGCCGAGGACACCGCCGTGTACTACTGCGC |
| | | CCGCGATCTCCGCGGGGCATTTGACATCTGGGGACAGGGAACCATGGTCACAGTGTCC |
| | | AGCGGAGGGGGAGGATCGGGTGGCGGAGGTTCCGGGGGTGGAGGCTCCTCCTACGTGC |
| | | TGACTCAGAGCCCAAGCGTCAGCGCTGCGCCCGGTTACACGGCAACCATCTCCTGTGG |
| | | CGGAAACAACATTGGGACCAAGTCTGTGCACTGGTATCAGCAGAAGCCGGGCCAAGCT |
| | | CCCCTGTTGGTGATCCGCGATGACTCCGTGCGGCCTAGCAAAATTCCGGGACGGTTCT |
| | | CCGGCTCCAACAGCGGCAATATGGCCACTCTCACCATCTCGGGAGTGCAGGCCGGAGA |
| | | TGAAGCCGACTTCTACTGCCAAGTCTGGGACTCAGACTCCGAGCATGTGGTGTTCGGG |
| | | GGCGGAACCAAGCTGACTGTGCTC |
| 149365-aa VH | 174 | EVQLVESGGGLVKPGGSLRLSCAASGFTFSDYYMSWIRQAPGKGLEWVSYISSSGSTI |
| | | YYADSVKGRFTISRDNAKNSLYLQMNSLRAEDTAVYYCARDLRGAFDIWGQGTMVTVS |
| | | S |
| 149365-aa VL | 195 | SYVLTQSPSVSAAPGYTATISCGGNNIGTKSVHWYQQKPGQAPLLVIRDDSVRPSKIP |
| | | GRFSGSNSGNMATLTISGVQAGDEADFYCQVWDSDSEHVVFGGGTKLTVL |
| 149365-aa Full | 216 | MALPVTALLLPLALLLHAARPEVQLVESGGGLVKPGGSLRLSCAASGFTFSDYYMSWI |
| CAR | | RQAPGKGLEWVSYISSSGSTIYYADSVKGRFTISRDNAKNSLYLQMNSLRAEDTAVYY |
| | | CARDLRGAFDIWGQGTMVTVSSGGGGSGGGGSGGGGSSYVLTQSPSVSAAPGYTATIS |
| | | CGGNNIGTKSVHWYQQKPGQAPLLVIRDDSVRPSKIPGRFSGSNSGNMATLTISGVQA |
| | | GDEADFYCQVWDSDSEHVVFGGGTKLTVLTTTPAPRPPTPAPTIASQPLSLRPEACRP |
| | | AAGGAVHTRGLDFACDIYIWAPLAGTCGVLLLSLVITLYCKRGRKKLLYIFKQPFMRP |
| | | VQTTQEEDGCSCRFPEEEEGGCELRVKFSRSADAPAYKQGQNQLYNELNLGRREEYDV |
| | | LDKRRGRDPEMGGKPRRKNPQEGLYNELQKDKMAEAYSEIGMKGERRRGKGHDGLYQG |
| | | LSTATKDTYDALHMQALPPR |
| 149365-nt | 237 | ATGGCCCTCCCTGTCACCGCCCTGCTGCTTCCGCTGGCTCTTCTGCTCCACGCCGCTC |
| Full CAR | | GGCCCGAAGTCCAGCTCGTGGAGTCCGGCGGAGGCCTTGTGAAGCCTGGAGGTTCGCT |
| | | GAGACTGTCCTGCGCCGCCTCCGGCTTCACCTTCTCCGACTACTACATGTCCTGGATC |
| | | AGACAGGCCCCGGGAAAGGGCCTGGAATGGGTGTCCTACATCTCGTCATCGGGCAGCA |
| | | CTATCTACTACGCGGACTCAGTGAAGGGGCGGTTCACCATTTCCCGGGATAACGCGAA |
| | | GAACTCGCTGTATCTGCAAATGAACTCACTGAGGGCCGAGGACACCGCCGTGTACTAC |
| | | TGCGCCCGCGATCTCCGCGGGGCATTTGACATCTGGGGACAGGGAACCATGGTCACAG |
| | | TGTCCAGCGGAGGGGGAGGATCGGGTGGCGGAGGTTCCGGGGGTGGAGGCTCCTCCTA |
| | | CGTGCTGACTCAGAGCCCAAGCGTCAGCGCTGCGCCCGGTTACACGGCAACCATCTCC |
| | | TGTGGCGGAAACAACATTGGGACCAAGTCTGTGCACTGGTATCAGCAGAAGCCGGGCC |
| | | AAGCTCCCCTGTTGGTGATCCGCGATGACTCCGTGCGGCCTAGCAAAATTCCGGGACG |
| | | GTTCTCCGGCTCCAACAGCGGCAATATGGCCACTCTCACCATCTCGGGAGTGCAGGCC |
| | | GGAGATGAAGCCGACTTCTACTGCCAAGTCTGGGACTCAGACTCCGAGCATGTGGTGT |
| | | TCGGGGGCGGAACCAAGCTGACTGTGCTCACCACTACCCCAGCACCGAGGCCACCCAC |
| | | CCCGGCTCCTACCATCGCCTCCCAGCCTCTGTCCCTGCGTCCGGAGGCATGTAGACCC |
| | | GCAGCTGGTGGGGCCGTGCATACCCGGGGTCTTGACTTCGCCTGCGATATCTACATTT |
| | | GGGCCCCTCTGGCTGGTACTTGCGGGGTCCTGCTGCTTTCACTCGTGATCACTCTTTA |
| | | CTGTAAGCGCGGTCGGAAGAAGCTGCTGTACATCTTTAAGCAACCCTTCATGAGGCCT |
| | | GTGCAGACTACTCAAGAGGAGGACGGCTGTTCATGCCGGTTCCCAGAGGAGGAGGAAG |
| | | GCGGCTGCGAACTGCGCGTGAAATTCAGCCGCAGCGCAGATGCTCCAGCCTACAAGCA |
| | | GGGGCAGAACCAGCTCTACAACGAACTCAATCTTGGTCGGAGAGAGGAGTACGACGTG |
| | | CTGGACAAGCGGAGAGGACGGGACCCAGAAATGGGCGGGAAGCCGCGCAGAAAGAATC |
| | | CCCAAGAGGGCCTGTACAACGAGCTCCAAAAGGATAAGATGGCAGAAGCCTATAGCGA |
| | | GATTGGTATGAAAGGGGAACGCAGAAGAGGCAAAGGCCACGACGGACTGTACCAGGGA |
| | | CTCAGCACCGCCACCAAGGACACCTATGACGCTCTTCACATGCAGGCCCTGCCGCCTC |
| | | GG |
| 149366 | | |
| 149366-aa | 133 | QVQLVQSGAEVKKPGASVKVSCKPSGYTVTSHYIHWVRRAPGQGLEWMGMINPSGGVT |
| ScFv domain | | AYSQTLQGRVTMTSDTSSSTVYMELSSLRSEDTAMYYCAREGSGSGWYFDFWGRGTLV |
| | | TVSSGGGGSGGGGSGGGGSSYVLTQPPSVSVSPGQTASITCSGDGLSKKYVSWYQQKA |
| | | GQSPVVLISRDKERPSGIPDRFSGSNSADTATLTISGTQAMDEADYYCQAWDDTTVVF |
| | | GGGTKLTVL |
| 149366-nt ScFv | 154 | CAAGTGCAGCTGGTGCAGAGCGGGGCCGAAGTCAAGAAGCCGGGAGCCTCCGTGAAAG |
| domain | | TGTCCTGCAAGCCTTCGGGATACACCGTGACCTCCCACTACATTCATTGGGTCCGCCG |
| | | CGCCCCCGGCCAAGGACTCGAGTGGATGGGCATGATCAACCCTAGCGGCGGAGTGACC |
| | | GCGTACAGCCAGACGCTGCAGGGACGCGTGACTATGACCTCGGATACCTCCTCCTCCA |
| | | CCGTCTATATGGAACTGTCCAGCCTGCGGTCCGAGGATACCGCCATGTACTACTGCGC |
| | | CCGGGAAGGATCAGGCTCCGGGTGGTATTTCGACTTCTGGGGAAGAGGCACCCTCGTG |
| | | ACTGTGTCATCTGGGGGAGGGGGTTCCGGTGGTGGCGGATCGGGAGGAGGCGGTTCAT |
| | | CCTACGTGCTGACCCAGCCACCCTCCGTGTCCGTGAGCCCCGGCCAGACTGCATCGAT |
| | | TACATGTAGCGGCGACGGCCTCTCCAAGAAATACGTGTCGTGGTACCAGCAGAAGGCC |
| | | GGACAGAGCCCGGTGGTGCTGATCTCAAGAGATAAGGAGCGGCCTAGCGGAATCCCGG |
| | | ACAGGTTCTCGGGTTCCAACTCCGCGGACACTGCTACTCTGACCATCTCGGGGACCCA |
| | | GGCTATGGACGAAGCCGATTACTACTGCCAAGCCTGGGACGACACTACTGTCGTGTTT |
| | | GGAGGGGGCACCAAGTTGACCGTCCTT |
| 149366-aa VH | 175 | QVQLVQSGAEVKKPGASVKVSCKPSGYTVTSHYIHWVRRAPGQGLEWMGMINPSGGVT |
| | | AYSQTLQGRVTMTSDTSSSTVYMELSSLRSEDTAMYYCAREGSGSGWYFDFWGRGTLV |
| | | TVSS |
| 149366-aa VL | 196 | SYVLTQPPSVSVSPGQTASITCSGDGLSKKYVSWYQQKAGQSPVVLISRDKERPSGIP |
| | | DRFSGSNSADTATLTISGTQAMDEADYYCQAWDDTTVVFGGGTKLTVL |
| 149366-aa Full | 217 | MALPVTALLLPLALLLHAARPQVQLVQSGAEVKKPGASVKVSCKPSGYTVTSHYIHWV |
| CAR | | RRAPGQGLEWMGMINPSGGVTAYSQTLQGRVTMTSDTSSSTVYMELSSLRSEDTAMYY |
| | | CAREGSGSGWYFDFWGRGTLVTVSSGGGGSGGGGSGGGGSSYVLTQPPSVSVSPGQTA |
| | | SITCSGDGLSKKYVSWYQQKAGQSPVVLISRDKERPSGIPDRFSGSNSADTATLTISG |
| | | TQAMDEADYYCQAWDDTTVVFGGGTKLTVLTTTPAPRPPTPAPTIASQPLSLRPEACR |
| | | PAAGGAVHTRGLDFACDIYIWAPLAGTCGVLLLSLVITLYCKRGRKKLLYIFKQPFMR |
| | | PVQTTQEEDGCSCRFPEEEEGGCELRVKFSRSADAPAYKQGQNQLYNELNLGRREEYD |
| | | VLDKRRGRDPEMGGKPRRKNPQEGLYNELQKDKMAEAYSEIGMKGERRRGKGHDGLYQ |
| | | GLSTATKDTYDALHMQALPPR |
| 149366-nt | 238 | ATGGCCCTCCCTGTCACCGCCCTGCTGCTTCCGCTGGCTCTTCTGCTCCACGCCGCTC |
| Full CAR | | GGCCCCAAGTGCAGCTGGTGCAGAGCGGGGCCGAAGTCAAGAAGCCGGGAGCCTCCGT |
| | | GAAAGTGTCCTGCAAGCCTTCGGGATACACCGTGACCTCCCACTACATTCATTGGGTC |
| | | CGCCGCGCCCCCGGCCAAGGACTCGAGTGGATGGGCATGATCAACCCTAGCGGCGGAG |
| | | TGACCGCGTACAGCCAGACGCTGCAGGGACGCGTGACTATGACCTCGGATACCTCCTC |
| | | CTCCACCGTCTATATGGAACTGTCCAGCCTGCGGTCCGAGGATACCGCCATGTACTAC |
| | | TGCGCCCGGGAAGGATCAGGCTCCGGGTGGTATTTCGACTTCTGGGGAAGAGGCACCC |
| | | TCGTGACTGTGTCATCTGGGGGAGGGGGTTCCGGTGGTGGCGGATCGGGAGGAGGCGG |
| | | TTCATCCTACGTGCTGACCCAGCCACCCTCCGTGTCCGTGAGCCCCGGCCAGACTGCA |
| | | TCGATTACATGTAGCGGCGACGGCCTCTCCAAGAAATACGTGTCGTGGTACCAGCAGA |
| | | AGGCCGGACAGAGCCCGGTGGTGCTGATCTCAAGAGATAAGGAGCGGCCTAGCGGAAT |
| | | CCCGGACAGGTTCTCGGGTTCCAACTCCGCGGACACTGCTACTCTGACCATCTCGGGG |
| | | ACCCAGGCTATGGACGAAGCCGATTACTACTGCCAAGCCTGGGACGACACTACTGTCG |
| | | TGTTTGGAGGGGGCACCAAGTTGACCGTCCTTACCACTACCCCAGCACCGAGGCCACC |
| | | CACCCCGGCTCCTACCATCGCCTCCCAGCCTCTGTCCCTGCGTCCGGAGGCATGTAGA |
| | | CCCGCAGCTGGTGGGGCCGTGCATACCCGGGGTCTTGACTTCGCCTGCGATATCTACA |
| | | TTTGGGCCCCTCTGGCTGGTACTTGCGGGGTCCTGCTGCTTTCACTCGTGATCACTCT |
| | | TTACTGTAAGCGCGGTCGGAAGAAGCTGCTGTACATCTTTAAGCAACCCTTCATGAGG |
| | | CCTGTGCAGACTACTCAAGAGGAGGACGGCTGTTCATGCCGGTTCCCAGAGGAGGAGG |
| | | AAGGCGGCTGCGAACTGCGCGTGAAATTCAGCCGCAGCGCAGATGCTCCAGCCTACAA |
| | | GCAGGGGCAGAACCAGCTCTACAACGAACTCAATCTTGGTCGGAGAGAGGAGTACGAC |
| | | GTGCTGGACAAGCGGAGAGGACGGGACCCAGAAATGGGCGGGAAGCCGCGCAGAAAGA |
| | | ATCCCCAAGAGGGCCTGTACAACGAGCTCCAAAAGGATAAGATGGCAGAAGCCTATAG |
| | | CGAGATTGGTATGAAAGGGGAACGCAGAAGAGGCAAAGGCCACGACGGACTGTACCAG |
| | | GGACTCAGCACCGCCACCAAGGACACCTATGACGCTCTTCACATGCAGGCCCTGCCGC |
| | | CTCGG |
| 149367 | | |
| 149367-aa | 134 | QVQLQESGPGLVKPSQTLSLTCTVSGGSISSGGYYWSWIRQHPGKGLEWIGYIYYSGS |
| ScFv domain | | TYYNPSLKSRVTISVDTSKNQFSLKLSSVTAADTAVYYCARAGIAARLRGAFDIWGQG |
| | | TMVTVSSGGGGSGGGGSGGGGSDIVMTQSPSSVSASVGDRVIITCRASQGIRNWLAWY |
| | | QQKPGKAPNLLIYAASNLQSGVPSRFSGSGSGADFTLTISSLQPEDVATYYCQKYNSA |
| | | PFTFGPGTKVDIK |
| 149367-nt ScFv | 155 | CAAGTGCAGCTTCAGGAGAGCGGCCCGGGACTCGTGAAGCCGTCCCAGACCCTGTCCC |
| domain | | TGACTTGCACCGTGTCGGGAGGAAGCATCTCGAGCGGAGGCTACTATTGGTCGTGGAT |
| | | TCGGCAGCACCCTGGAAAGGGCCTGGAATGGATCGGCTACATCTACTACTCCGGCTCG |
| | | ACCTACTACAACCCATCGCTGAAGTCCAGAGTGACAATCTCAGTGGACACGTCCAAGA |
| | | ATCAGTTCAGCCTGAAGCTCTCTTCCGTGACTGCGGCCGACACCGCCGTGTACTACTG |
| | | CGCACGCGCTGGAATTGCCGCCCGGCTGAGGGGTGCCTTCGACATTTGGGGACAGGGC |
| | | ACCATGGTCACCGTGTCCTCCGGCGGCGGAGGTTCCGGGGGTGGAGGCTCAGGAGGAG |
| | | GGGGGTCCGACATCGTCATGACTCAGTCGCCCTCAAGCGTCAGCGCGTCCGTCGGGGA |
| | | CAGAGTGATCATCACCTGTCGGGCGTCCCAGGGAATTCGCAACTGGCTGGCCTGGTAT |
| | | CAGCAGAAGCCCGGAAAGGCCCCCAACCTGTTGATCTACGCCGCCTCAAACCTCCAAT |
| | | CCGGGGTGCCGAGCCGCTTCAGCGGCTCCGGTTCGGGTGCCGATTTCACTCTGACCAT |
| | | CTCCTCCCTGCAACCTGAAGATGTGGCTACCTACTACTGCCAAAAGTACAACTCCGCA |
| | | CCTTTTACTTTCGGACCGGGGACCAAAGTGGACATTAAG |
| 149367-aa VH | 176 | QVQLQESGPGLVKPSQTLSLTCTVSGGSISSGGYYWSWIRQHPGKGLEWIGYIYYSGS |
| | | TYYNPSLKSRVTISVDTSKNQFSLKLSSVTAADTAVYYCARAGIAARLRGAFDIWGQG |
| | | TMVTVSS |
| 149367-aa VL | 197 | DIVMTQSPSSVSASVGDRVIITCRASQGIRNWLAWYQQKPGKAPNLLIYAASNLQSGV |
| | | PSRFSGSGSGADFTLTISSLQPEDVATYYCQKYNSAPFTFGPGTKVDIK |
| 149367-aa Full | 218 | MALPVTALLLPLALLLHAARPQVQLQESGPGLVKPSQTLSLTCTVSGGSISSGGYYWS |
| CAR | | WIRQHPGKGLEWIGYIYYSGSTYYNPSLKSRVTISVDTSKNQFSLKLSSVTAADTAVY |
| | | YCARAGIAARLRGAFDIWGQGTMVTVSSGGGGSGGGGSGGGGSDIVMTQSPSSVSASV |
| | | GDRVIITCRASQGIRNWLAWYQQKPGKAPNLLIYAASNLQSGVPSRFSGSGSGADFTL |
| | | TISSLQPEDVATYYCQKYNSAPFTFGPGTKVDIKTTTPAPRPPTPAPTIASQPLSLRP |
| | | EACRPAAGGAVHTRGLDFACDIYIWAPLAGTCGVLLLSLVITLYCKRGRKKLLYIFKQ |
| | | PFMRPVQTTQEEDGCSCRFPEEEEGGCELRVKFSRSADAPAYKQGQNQLYNELNLGRR |
| | | EEYDVLDKRRGRDPEMGGKPRRKNPQEGLYNELQKDKMAEAYSEIGMKGERRRGKGHD |
| | | GLYQGLSTATKDTYDALHMQALPPR |
| 149367-nt | 239 | ATGGCCCTCCCTGTCACCGCCCTGCTGCTTCCGCTGGCTCTTCTGCTCCACGCCGCTC |
| Full CAR | | GGCCCCAAGTGCAGCTTCAGGAGAGCGGCCCGGGACTCGTGAAGCCGTCCCAGACCCT |
| | | GTCCCTGACTTGCACCGTGTCGGGAGGAAGCATCTCGAGCGGAGGCTACTATTGGTCG |
| | | TGGATTCGGCAGCACCCTGGAAAGGGCCTGGAATGGATCGGCTACATCTACTACTCCG |
| | | GCTCGACCTACTACAACCCATCGCTGAAGTCCAGAGTGACAATCTCAGTGGACACGTC |
| | | CAAGAATCAGTTCAGCCTGAAGCTCTCTTCCGTGACTGCGGCCGACACCGCCGTGTAC |
| | | TACTGCGCACGCGCTGGAATTGCCGCCCGGCTGAGGGGTGCCTTCGACATTTGGGGAC |
| | | AGGGCACCATGGTCACCGTGTCCTCCGGCGGCGGAGGTTCCGGGGGTGGAGGCTCAGG |
| | | AGGAGGGGGGTCCGACATCGTCATGACTCAGTCGCCCTCAAGCGTCAGCGCGTCCGTC |
| | | GGGGACAGAGTGATCATCACCTGTCGGGCGTCCCAGGGAATTCGCAACTGGCTGGCCT |
| | | GGTATCAGCAGAAGCCCGGAAAGGCCCCCAACCTGTTGATCTACGCCGCCTCAAACCT |
| | | CCAATCCGGGGTGCCGAGCCGCTTCAGCGGCTCCGGTTCGGGTGCCGATTTCACTCTG |
| | | ACCATCTCCTCCCTGCAACCTGAAGATGTGGCTACCTACTACTGCCAAAAGTACAACT |
| | | CCGCACCTTTTACTTTCGGACCGGGGACCAAAGTGGACATTAAGACCACTACCCCAGC |
| | | ACCGAGGCCACCCACCCCGGCTCCTACCATCGCCTCCCAGCCTCTGTCCCTGCGTCCG |
| | | GAGGCATGTAGACCCGCAGCTGGTGGGGCCGTGCATACCCGGGGTCTTGACTTCGCCT |
| | | GCGATATCTACATTTGGGCCCCTCTGGCTGGTACTTGCGGGGTCCTGCTGCTTTCACT |
| | | CGTGATCACTCTTTACTGTAAGCGCGGTCGGAAGAAGCTGCTGTACATCTTTAAGCAA |
| | | CCCTTCATGAGGCCTGTGCAGACTACTCAAGAGGAGGACGGCTGTTCATGCCGGTTCC |
| | | CAGAGGAGGAGGAAGGCGGCTGCGAACTGCGCGTGAAATTCAGCCGCAGCGCAGATGC |
| | | TCCAGCCTACAAGCAGGGGCAGAACCAGCTCTACAACGAACTCAATCTTGGTCGGAGA |
| | | GAGGAGTACGACGTGCTGGACAAGCGGAGAGGACGGGACCCAGAAATGGGCGGGAAGC |
| | | CGCGCAGAAAGAATCCCCAAGAGGGCCTGTACAACGAGCTCCAAAAGGATAAGATGGC |
| | | AGAAGCCTATAGCGAGATTGGTATGAAAGGGGAACGCAGAAGAGGCAAAGGCCACGAC |
| | | GGACTGTACCAGGGACTCAGCACCGCCACCAAGGACACCTATGACGCTCTTCACATGC |
| | | AGGCCCTGCCGCCTCGG |
| 149368 | | |
| 149368-aa | 135 | QVQLVQSGAEVKKPGSSVKVSCKASGGTFSSYAISWVRQAPGQGLEWMGGIIPIFGTA |
| ScFv domain | | NYAQKFQGRVTITADESTSTAYMELSSLRSEDTAVYYCARRGGYQLLRWDVGLLRSAF |
| | | DIWGQGTMVTVSSGGGGSGGGGSGGGGSSYVLTQPPSVSVAPGQTARITCGGNNIGSK |
| | | SVHWYQQKPGQAPVLVLYGKNNRPSGVPDRFSGSRSGTTASLTITGAQAEDEADYYCS |
| | | SRDSSGDHLRVFGTGTKVTVL |
| 149368-nt ScFv | 156 | CAAGTGCAGCTGGTCCAGTCGGGCGCCGAGGTCAAGAAGCCCGGGAGCTCTGTGAAAG |
| domain | | TGTCCTGCAAGGCCTCCGGGGGCACCTTTAGCTCCTACGCCATCTCCTGGGTCCGCCA |
| | | AGCACCGGGTCAAGGCCTGGAGTGGATGGGGGGAATTATCCCTATCTTCGGCACTGCC |
| | | AACTACGCCCAGAAGTTCCAGGGACGCGTGACCATTACCGCGGACGAATCCACCTCCA |
| | | CCGCTTATATGGAGCTGTCCAGCTTGCGCTCGGAAGATACCGCCGTGTACTACTGCGC |
| | | CCGGAGGGGTGGATACCAGCTGCTGAGATGGGACGTGGGCCTCCTGCGGTCGGCGTTC |
| | | GACATCTGGGGCCAGGGCACTATGGTCACTGTGTCCAGCGGAGGAGGCGGATCGGGAG |
| | | GCGGCGGATCAGGGGGAGGCGGTTCCAGCTACGTGCTTACTCAACCCCCTTCGGTGTC |
| | | CGTGGCCCCGGGACAGACCGCCAGAATCACTTGCGGAGGAAACAACATTGGGTCCAAG |
| | | AGCGTGCATTGGTACCAGCAGAAGCCAGGACAGGCCCCTGTGCTGGTGCTCTACGGGA |
| | | AGAACAATCGGCCCAGCGGAGTGCCGGACAGGTTCTCGGGTTCACGCTCCGGTACAAC |
| | | CGCTTCACTGACTATCACCGGGGCCCAGGCAGAGGATGAAGCGGACTACTACTGTTCC |
| | | TCCCGGGATTCATCCGGCGACCACCTCCGGGTGTTCGGAACCGGAACGAAGGTCACCG |
| | | TGCTG |
| 149368-aa VH | 177 | QVQLVQSGAEVKKPGSSVKVSCKASGGTFSSYAISWVRQAPGQGLEWMGGIIPIFGTA |
| | | NYAQKFQGRVTITADESTSTAYMELSSLRSEDTAVYYCARRGGYQLLRWDVGLLRSAF |
| | | DIWGQGTMVTVSS |
| 149368-aa VL | 198 | SYVLTQPPSVSVAPGQTARITCGGNNIGSKSVHWYQQKPGQAPVLVLYGKNNRPSGVP |
| | | DRFSGSRSGTTASLTITGAQAEDEADYYCSSRDSSGDHLRVFGTGTKVTVL |
| 149368-aa Full | 219 | MALPVTALLLPLALLLHAARPQVQLVQSGAEVKKPGSSVKVSCKASGGTFSSYAISWV |
| CAR | | RQAPGQGLEWMGGIIPIFGTANYAQKFQGRVTITADESTSTAYMELSSLRSEDTAVYY |
| | | CARRGGYQLLRWDVGLLRSAFDIWGQGTMVTVSSGGGGSGGGGSGGGGSSYVLTQPPS |
| | | VSVAPGQTARITCGGNNIGSKSVHWYQQKPGQAPVLVLYGKNNRPSGVPDRFSGSRSG |
| | | TTASLTITGAQAEDEADYYCSSRDSSGDHLRVFGTGTKVTVLTTTPAPRPPTPAPTIA |
| | | SQPLSLRPEACRPAAGGAVHTRGLDFACDIYIWAPLAGTCGVLLLSLVITLYCKRGRK |
| | | KLLYIFKQPFMRPVQTTQEEDGCSCRFPEEEEGGCELRVKFSRSADAPAYKQGQNQLY |
| | | NELNLGRREEYDVLDKRRGRDPEMGGKPRRKNPQEGLYNELQKDKMAEAYSEIGMKGE |
| | | RRRGKGHDGLYQGLSTATKDTYDALHMQALPPR |
| 149368-nt | 240 | ATGGCCCTCCCTGTCACCGCCCTGCTGCTTCCGCTGGCTCTTCTGCTCCACGCCGCTC |
| Full CAR | | GGCCCCAAGTGCAGCTGGTCCAGTCGGGCGCCGAGGTCAAGAAGCCCGGGAGCTCTGT |
| | | GAAAGTGTCCTGCAAGGCCTCCGGGGGCACCTTTAGCTCCTACGCCATCTCCTGGGTC |
| | | CGCCAAGCACCGGGTCAAGGCCTGGAGTGGATGGGGGGAATTATCCCTATCTTCGGCA |
| | | CTGCCAACTACGCCCAGAAGTTCCAGGGACGCGTGACCATTACCGCGGACGAATCCAC |
| | | CTCCACCGCTTATATGGAGCTGTCCAGCTTGCGCTCGGAAGATACCGCCGTGTACTAC |
| | | TGCGCCCGGAGGGGTGGATACCAGCTGCTGAGATGGGACGTGGGCCTCCTGCGGTCGG |
| | | CGTTCGACATCTGGGGCCAGGGCACTATGGTCACTGTGTCCAGCGGAGGAGGCGGATC |
| | | GGGAGGCGGCGGATCAGGGGGAGGCGGTTCCAGCTACGTGCTTACTCAACCCCCTTCG |
| | | GTGTCCGTGGCCCCGGGACAGACCGCCAGAATCACTTGCGGAGGAAACAACATTGGGT |
| | | CCAAGAGCGTGCATTGGTACCAGCAGAAGCCAGGACAGGCCCCTGTGCTGGTGCTCTA |
| | | CGGGAAGAACAATCGGCCCAGCGGAGTGCCGGACAGGTTCTCGGGTTCACGCTCCGGT |
| | | ACAACCGCTTCACTGACTATCACCGGGGCCCAGGCAGAGGATGAAGCGGACTACTACT |
| | | GTTCCTCCCGGGATTCATCCGGCGACCACCTCCGGGTGTTCGGAACCGGAACGAAGGT |
| | | CACCGTGCTGACCACTACCCCAGCACCGAGGCCACCCACCCCGGCTCCTACCATCGCC |
| | | TCCCAGCCTCTGTCCCTGCGTCCGGAGGCATGTAGACCCGCAGCTGGTGGGGCCGTGC |
| | | ATACCCGGGGTCTTGACTTCGCCTGCGATATCTACATTTGGGCCCCTCTGGCTGGTAC |
| | | TTGCGGGGTCCTGCTGCTTTCACTCGTGATCACTCTTTACTGTAAGCGCGGTCGGAAG |
| | | AAGCTGCTGTACATCTTTAAGCAACCCTTCATGAGGCCTGTGCAGACTACTCAAGAGG |
| | | AGGACGGCTGTTCATGCCGGTTCCCAGAGGAGGAGGAAGGCGGCTGCGAACTGCGCGT |
| | | GAAATTCAGCCGCAGCGCAGATGCTCCAGCCTACAAGCAGGGGCAGAACCAGCTCTAC |
| | | AACGAACTCAATCTTGGTCGGAGAGAGGAGTACGACGTGCTGGACAAGCGGAGAGGAC |
| | | GGGACCCAGAAATGGGCGGGAAGCCGCGCAGAAAGAATCCCCAAGAGGGCCTGTACAA |
| | | CGAGCTCCAAAAGGATAAGATGGCAGAAGCCTATAGCGAGATTGGTATGAAAGGGGAA |
| | | CGCAGAAGAGGCAAAGGCCACGACGGACTGTACCAGGGACTCAGCACCGCCACCAAGG |
| | | ACACCTATGACGCTCTTCACATGCAGGCCCTGCCGCCTCGG |
| 149369 | | |
| 149369-aa | 136 | EVQLQQSGPGLVKPSQTLSLTCAISGDSVSSNSAAWNWIRQSPSRGLEWLGRTYYRSK |
| ScFv domain | | WYSFYAISLKSRIIINPDTSKNQFSLQLKSVTPEDTAVYYCARSSPEGLFLYWFDPWG |
| | | QGTLVTVSSGGDGSGGGGSGGGGSSSELTQDPAVSVALGQTIRITCQGDSLGNYYATW |
| | | YQQKPGQAPVLVIYGTNNRPSGIPDRFSASSSGNTASLTITGAQAEDEADYYCNSRDS |
| | | SGHHLLFGTGTKVTVL |
| 149369-nt ScFv | 157 | GAAGTGCAGCTCCAACAGTCAGGACCGGGGCTCGTGAAGCCATCCCAGACCCTGTCCC |
| domain | | TGACTTGTGCCATCTCGGGAGATAGCGTGTCATCGAACTCCGCCGCCTGGAACTGGAT |
| | | TCGGCAGAGCCCGTCCCGCGGACTGGAGTGGCTTGGAAGGACCTACTACCGGTCCAAG |
| | | TGGTACTCTTTCTACGCGATCTCGCTGAAGTCCCGCATTATCATTAACCCTGATACCT |
| | | CCAAGAATCAGTTCTCCCTCCAACTGAAATCCGTCACCCCCGAGGACACAGCAGTGTA |
| | | TTACTGCGCACGGAGCAGCCCCGAAGGACTGTTCCTGTATTGGTTTGACCCCTGGGGC |
| | | CAGGGGACTCTTGTGACCGTGTCGAGCGGCGGAGATGGGTCCGGTGGCGGTGGTTCGG |
| | | GGGGCGGCGGATCATCATCCGAACTGACCCAGGACCCGGCTGTGTCCGTGGCGCTGGG |
| | | ACAAACCATCCGCATTACGTGCCAGGGAGACTCCCTGGGCAACTACTACGCCACTTGG |
| | | TACCAGCAGAAGCCGGGCCAAGCCCCTGTGTTGGTCATCTACGGGACCAACAACAGAC |
| | | CTTCCGGCATCCCCGACCGGTTCAGCGCTTCGTCCTCCGGCAACACTGCCAGCCTGAC |
| | | CATCACTGGAGCGCAGGCCGAAGATGAGGCCGACTACTACTGCAACAGCAGAGACTCC |
| | | TCGGGTCATCACCTCTTGTTCGGAACTGGAACCAAGGTCACCGTGCTG |
| 149369-aa VH | 178 | EVQLQQSGPGLVKPSQTLSLTCAISGDSVSSNSAAWNWIRQSPSRGLEWLGRTYYRSK |
| | | WYSFYAISLKSRIIINPDTSKNQFSLQLKSVTPEDTAVYYCARSSPEGLFLYWFDPWG |
| | | QGTLVTVSS |
| 149369-aa VL | 199 | SSELTQDPAVSVALGQTIRITCQGDSLGNYYATWYQQKPGQAPVLVIYGTNNRPSGIP |
| | | DRFSASSSGNTASLTITGAQAEDEADYYCNSRDSSGHHLLFGTGTKVTVL |
| 149369-aa Full | 220 | MALPVTALLLPLALLLHAARPEVQLQQSGPGLVKPSQTLSLTCAISGDSVSSNSAAWN |
| CAR | | WIRQSPSRGLEWLGRTYYRSKWYSFYAISLKSRIIINPDTSKNQFSLQLKSVTPEDTA |
| | | VYYCARSSPEGLFLYWFDPWGQGTLVTVSSGGDGSGGGGSGGGGSSSELTQDPAVSVA |
| | | LGQTIRITCQGDSLGNYYATWYQQKPGQAPVLVIYGTNNRPSGIPDRFSASSSGNTAS |
| | | LTITGAQAEDEADYYCNSRDSSGHHLLFGTGTKVTVLTTTPAPRPPTPAPTIASQPLS |
| | | LRPEACRPAAGGAVHTRGLDFACDIYIWAPLAGTCGVLLLSLVITLYCKRGRKKLLYI |
| | | FKQPFMRPVQTTQEEDGCSCRFPEEEEGGCELRVKFSRSADAPAYKQGQNQLYNELNL |
| | | GRREEYDVLDKRRGRDPEMGGKPRRKNPQEGLYNELQKDKMAEAYSEIGMKGERRRGK |
| | | GHDGLYQGLSTATKDTYDALHMQALPPR |
| 149369-nt | 241 | ATGGCCCTCCCTGTCACCGCCCTGCTGCTTCCGCTGGCTCTTCTGCTCCACGCCGCTC |
| Full CAR | | GGCCCGAAGTGCAGCTCCAACAGTCAGGACCGGGGCTCGTGAAGCCATCCCAGACCCT |
| | | GTCCCTGACTTGTGCCATCTCGGGAGATAGCGTGTCATCGAACTCCGCCGCCTGGAAC |
| | | TGGATTCGGCAGAGCCCGTCCCGCGGACTGGAGTGGCTTGGAAGGACCTACTACCGGT |
| | | CCAAGTGGTACTCTTTCTACGCGATCTCGCTGAAGTCCCGCATTATCATTAACCCTGA |
| | | TACCTCCAAGAATCAGTTCTCCCTCCAACTGAAATCCGTCACCCCCGAGGACACAGCA |
| | | GTGTATTACTGCGCACGGAGCAGCCCCGAAGGACTGTTCCTGTATTGGTTTGACCCCT |
| | | GGGGCCAGGGGACTCTTGTGACCGTGTCGAGCGGCGGAGATGGGTCCGGTGGCGGTGG |
| | | TTCGGGGGGCGGCGGATCATCATCCGAACTGACCCAGGACCCGGCTGTGTCCGTGGCG |
| | | CTGGGACAAACCATCCGCATTACGTGCCAGGGAGACTCCCTGGGCAACTACTACGCCA |
| | | CTTGGTACCAGCAGAAGCCGGGCCAAGCCCCTGTGTTGGTCATCTACGGGACCAACAA |
| | | CAGACCTTCCGGCATCCCCGACCGGTTCAGCGCTTCGTCCTCCGGCAACACTGCCAGC |
| | | CTGACCATCACTGGAGCGCAGGCCGAAGATGAGGCCGACTACTACTGCAACAGCAGAG |
| | | ACTCCTCGGGTCATCACCTCTTGTTCGGAACTGGAACCAAGGTCACCGTGCTGACCAC |
| | | TACCCCAGCACCGAGGCCACCCACCCCGGCTCCTACCATCGCCTCCCAGCCTCTGTCC |
| | | CTGCGTCCGGAGGCATGTAGACCCGCAGCTGGTGGGGCCGTGCATACCCGGGGTCTTG |
| | | ACTTCGCCTGCGATATCTACATTTGGGCCCCTCTGGCTGGTACTTGCGGGGTCCTGCT |
| | | GCTTTCACTCGTGATCACTCTTTACTGTAAGCGCGGTCGGAAGAAGCTGCTGTACATC |
| | | TTTAAGCAACCCTTCATGAGGCCTGTGCAGACTACTCAAGAGGAGGACGGCTGTTCAT |
| | | GCCGGTTCCCAGAGGAGGAGGAAGGCGGCTGCGAACTGCGCGTGAAATTCAGCCGCAG |
| | | CGCAGATGCTCCAGCCTACAAGCAGGGGCAGAACCAGCTCTACAACGAACTCAATCTT |
| | | GGTCGGAGAGAGGAGTACGACGTGCTGGACAAGCGGAGAGGACGGGACCCAGAAATGG |
| | | GCGGGAAGCCGCGCAGAAAGAATCCCCAAGAGGGCCTGTACAACGAGCTCCAAAAGGA |
| | | TAAGATGGCAGAAGCCTATAGCGAGATTGGTATGAAAGGGGAACGCAGAAGAGGCAAA |
| | | GGCCACGACGGACTGTACCAGGGACTCAGCACCGCCACCAAGGACACCTATGACGCTC |
| | | TTCACATGCAGGCCCTGCCGCCTCGG |
| BCMA_EBB- | | |
| C1978-A4 | | |
| BCMA_EBB- | 137 | EVQLVESGGGLVQPGGSLRLSCAASGFTFSSYAMSWVRQAPGKGLEWVSAISGSGGST |
| C1978-A4-aa | | YYADSVKGRFTISRDNSKNTLYLQMNSLRAEDTAVYYCAKVEGSGSLDYWGQGTLVTV |
| ScFv domain | | SSGGGGSGGGGSGGGGSEIVMTQSPGTLSLSPGERATLSCRASQSVSSAYLAWYQQKP |
| | | GQPPRLLISGASTRATGIPDRFGGSGSGTDFTLTISRLEPEDFAVYYCQHYGSSFNGS |
| | | SLFTFGQGTRLEIK |
| BCMA_EBB- | 158 | GAAGTGCAGCTCGTGGAGTCAGGAGGCGGCCTGGTCCAGCCGGGAGGGTCCCTTAGAC |
| C1978-A4-nt | | TGTCATGCGCCGCAAGCGGATTCACTTTCTCCTCCTATGCCATGAGCTGGGTCCGCCA |
| ScFv domain | | AGCCCCCGGAAAGGGACTGGAATGGGTGTCCGCCATCTCGGGGTCTGGAGGCTCAACT |
| | | TACTACGCTGACTCCGTGAAGGGACGGTTCACCATTAGCCGCGACAACTCCAAGAACA |
| | | CCCTCTACCTCCAAATGAACTCCCTGCGGGCCGAGGATACCGCCGTCTACTACTGCGC |
| | | CAAAGTGGAAGGTTCAGGATCGCTGGACTACTGGGGACAGGGTACTCTCGTGACCGTG |
| | | TCATCGGGCGGAGGAGGTTCCGGCGGTGGCGGCTCCGGCGGCGGAGGGTCGGAGATCG |
| | | TGATGACCCAGAGCCCTGGTACTCTGAGCCTTTCGCCGGGAGAAAGGGCCACCCTGTC |
| | | CTGCCGCGCTTCCCAATCCGTGTCCTCCGCGTACTTGGCGTGGTACCAGCAGAAGCCG |
| | | GGACAGCCCCCTCGGCTGCTGATCAGCGGGGCCAGCACCCGGGCAACCGGAATCCCAG |
| | | ACAGATTCGGGGGTTCCGGCAGCGGCACAGATTTCACCCTGACTATTTCGAGGTTGGA |
| | | GCCCGAGGACTTTGCGGTGTATTACTGTCAGCACTACGGGTCGTCCTTTAATGGCTCC |
| | | AGCCTGTTCACGTTCGGACAGGGGACCCGCCTGGAAATCAAG |
| BCMA_EBB- | 179 | EVQLVESGGGLVQPGGSLRLSCAASGFTFSSYAMSWVRQAPGKGLEWVSAISGSGGST |
| C1978-A4-aa | | YYADSVKGRFTISRDNSKNTLYLQMNSLRAEDTAVYYCAKVEGSGSLDYWGQGTLVTV |
| VH | | SS |
| BCMA_EBB- | 200 | EIVMTQSPGTLSLSPGERATLSCRASQSVSSAYLAWYQQKPGQPPRLLISGASTRATG |
| C1978-A4-aa | | IPDRFGGSGSGTDFTLTISRLEPEDFAVYYCQHYGSSFNGSSLFTFGQGTRLEIK |
| VL | | |
| BCMA_EBB- | 221 | MALPVTALLLPLALLLHAARPEVQLVESGGGLVQPGGSLRLSCAASGFTFSSYAMSWV |
| C1978-A4-aa | | RQAPGKGLEWVSAISGSGGSTYYADSVKGRFTISRDNSKNTLYLQMNSLRAEDTAVYY |
| Full CART | | CAKVEGSGSLDYWGQGTLVTVSSGGGGSGGGGSGGGGSEIVMTQSPGTLSLSPGERAT |
| | | LSCRASQSVSSAYLAWYQQKPGQPPRLLISGASTRATGIPDRFGGSGSGTDFTLTISR |
| | | LEPEDFAVYYCQHYGSSFNGSSLFTFGQGTRLEIKTTTPAPRPPTPAPTIASQPLSLR |
| | | PEACRPAAGGAVHTRGLDFACDIYIWAPLAGTCGVLLLSLVITLYCKRGRKKLLYIFK |
| | | QPFMRPVQTTQEEDGCSCRFPEEEEGGCELRVKFSRSADAPAYKQGQNQLYNELNLGR |
| | | REEYDVLDKRRGRDPEMGGKPRRKNPQEGLYNELQKDKMAEAYSEIGMKGERRRGKGH |
| | | DGLYQGLSTATKDTYDALHMQALPPR |
| BCMA_EBB- | 242 | ATGGCCCTCCCTGTCACCGCCCTGCTGCTTCCGCTGGCTCTTCTGCTCCACGCCGCTC |
| C1978-A4-nt | | GGCCCGAAGTGCAGCTCGTGGAGTCAGGAGGCGGCCTGGTCCAGCCGGGAGGGTCCCT |
| Full CART | | TAGACTGTCATGCGCCGCAAGCGGATTCACTTTCTCCTCCTATGCCATGAGCTGGGTC |
| | | CGCCAAGCCCCCGGAAAGGGACTGGAATGGGTGTCCGCCATCTCGGGGTCTGGAGGCT |
| | | CAACTTACTACGCTGACTCCGTGAAGGGACGGTTCACCATTAGCCGCGACAACTCCAA |
| | | GAACACCCTCTACCTCCAAATGAACTCCCTGCGGGCCGAGGATACCGCCGTCTACTAC |
| | | TGCGCCAAAGTGGAAGGTTCAGGATCGCTGGACTACTGGGGACAGGGTACTCTCGTGA |
| | | CCGTGTCATCGGGCGGAGGAGGTTCCGGCGGTGGCGGCTCCGGCGGCGGAGGGTCGGA |
| | | GATCGTGATGACCCAGAGCCCTGGTACTCTGAGCCTTTCGCCGGGAGAAAGGGCCACC |
| | | CTGTCCTGCCGCGCTTCCCAATCCGTGTCCTCCGCGTACTTGGCGTGGTACCAGCAGA |
| | | AGCCGGGACAGCCCCCTCGGCTGCTGATCAGCGGGGCCAGCACCCGGGCAACCGGAAT |
| | | CCCAGACAGATTCGGGGGTTCCGGCAGCGGCACAGATTTCACCCTGACTATTTCGAGG |
| | | TTGGAGCCCGAGGACTTTGCGGTGTATTACTGTCAGCACTACGGGTCGTCCTTTAATG |
| | | GCTCCAGCCTGTTCACGTTCGGACAGGGGACCCGCCTGGAAATCAAGACCACTACCCC |
| | | AGCACCGAGGCCACCCACCCCGGCTCCTACCATCGCCTCCCAGCCTCTGTCCCTGCGT |
| | | CCGGAGGCATGTAGACCCGCAGCTGGTGGGGCCGTGCATACCCGGGGTCTTGACTTCG |
| | | CCTGCGATATCTACATTTGGGCCCCTCTGGCTGGTACTTGCGGGGTCCTGCTGCTTTC |
| | | ACTCGTGATCACTCTTTACTGTAAGCGCGGTCGGAAGAAGCTGCTGTACATCTTTAAG |
| | | CAACCCTTCATGAGGCCTGTGCAGACTACTCAAGAGGAGGACGGCTGTTCATGCCGGT |
| | | TCCCAGAGGAGGAGGAAGGCGGCTGCGAACTGCGCGTGAAATTCAGCCGCAGCGCAGA |
| | | TGCTCCAGCCTACAAGCAGGGGCAGAACCAGCTCTACAACGAACTCAATCTTGGTCGG |
| | | AGAGAGGAGTACGACGTGCTGGACAAGCGGAGAGGACGGGACCCAGAAATGGGCGGGA |
| | | AGCCGCGCAGAAAGAATCCCCAAGAGGGCCTGTACAACGAGCTCCAAAAGGATAAGAT |
| | | GGCAGAAGCCTATAGCGAGATTGGTATGAAAGGGGAACGCAGAAGAGGCAAAGGCCAC |
| | | GACGGACTGTACCAGGGACTCAGCACCGCCACCAAGGACACCTATGACGCTCTTCACA |
| | | TGCAGGCCCTGCCGCCTCGG |
| BCMA_EBB- | | |
| C1978-G1 | | |
| BCMA_EBB- | 138 | EVQLVETGGGLVQPGGSLRLSCAASGITFSRYPMSWVRQAPGKGLEWVSGISD |
| C1978-G1-aa | | SGVSTYYADSAKGRFTISRDNSKNTLFLQMSSLRDEDTAVYYCVTRAGSEASD |
| ScFv domain | | IWGQGTMVTVSSGGGGSGGGGSGGGGSEIVLTQSPATLSLSPGERATLSCRAS |
| | | QSVSNSLAWYQQKPGQAPRLLIYDASSRATGIPDRFSGSGSGTDFTLTISRLEPE |
| | | DFAIYYCQQFGTSSGLTFGGGTKLEIK |
| BCMA_EBB- | 159 | GAAGTGCAACTGGTGGAAACCGGTGGCGGCCTGGTGCAGCCTGGAGGATCATTGAGGC |
| C1978-G1-nt | | TGTCATGCGCGGCCAGCGGTATTACCTTCTCCCGGTACCCCATGTCCTGGGTCAGACA |
| ScFv domain | | GGCCCCGGGGAAAGGGCTTGAATGGGTGTCCGGGATCTCGGACTCCGGTGTCAGCACT |
| | | TACTACGCCGACTCCGCCAAGGGACGCTTCACCATTTCCCGGGACAACTCGAAGAACA |
| | | CCCTGTTCCTCCAAATGAGCTCCCTCCGGGACGAGGATACTGCAGTGTACTACTGCGT |
| | | GACCCGCGCCGGGTCCGAGGCGTCTGACATTTGGGGACAGGGCACTATGGTCACCGTG |
| | | TCGTCCGGCGGAGGGGGCTCGGGAGGCGGTGGCAGCGGAGGAGGAGGGTCCGAGATCG |
| | | TGCTGACCCAATCCCCGGCCACCCTCTCGCTGAGCCCTGGAGAAAGGGCAACCTTGTC |
| | | CTGTCGCGCGAGCCAGTCCGTGAGCAACTCCCTGGCCTGGTACCAGCAGAAGCCCGGA |
| | | CAGGCTCCGAGACTTCTGATCTACGACGCTTCGAGCCGGGCCACTGGAATCCCCGACC |
| | | GCTTTTCGGGGTCCGGCTCAGGAACCGATTTCACCCTGACAATCTCACGGCTGGAGCC |
| | | AGAGGATTTCGCCATCTATTACTGCCAGCAGTTCGGTACTTCCTCCGGCCTGACTTTC |
| | | GGAGGCGGCACGAAGCTCGAAATCAAG |
| BCMA_EBB- | 180 | EVQLVETGGGLVQPGGSLRLSCAASGITFSRYPMSWVRQAPGKGLEWVSGISDSGVST |
| C1978-G1-aa | | YYADSAKGRFTISRDNSKNTLFLQMSSLRDEDTAVYYCVTRAGSEASDIWGQGTMVTV |
| VH | | SS |
| BCMA_EBB- | 201 | EIVLTQSPATLSLSPGERATLSCRASQSVSNSLAWYQQKPGQAPRLLIYDASSRATGI |
| C1978-G1-aa | | PDRFSGSGSGTDFTLTISRLEPEDFAIYYCQQFGTSSGLTFGGGTKLEIK |
| VL | | |
| BCMA_EBB- | 222 | MALPVTALLLPLALLLHAARPEVQLVETGGGLVQPGGSLRLSCAASGITFSRYP |
| C1978-G1-aa | | MSWVRQAPGKGLEWVSGISDSGVSTYYADSAKGRFTISRDNSKNTLFLQMSS |
| Full CART | | LRDEDTAVYYCVTRAGSEASDIWGQGTMVTVSSGGGGSGGGGSGGGGSEIVL |
| | | TQSPATLSLSPGERATLSCRASQSVSNSLAWYQQKPGQAPRLLIYDASSRATGI |
| | | PDRFSGSGSGTDFTLTISRLEPEDFAIYYCQQFGTSSGLTFGGGTKLEIKTTTPAP |
| | | RPPTPAPTIASQPLSLRPEACRPAAGGAVHTRGLDFACDIYIWAPLAGTCGVLL |
| | | LSLVITLYCKRGRKKLLYIFKQPFMRPVQTTQLEDGCSCRFPEELEGGCELRVK |
| | | FSRSADAPAYKQGQNQLYNELNLGRREEYDVLDKRRGRDPEMGGKPRRKNP |
| | | QEGLYNELQKDKMAEAYSEIGMKGERRRGKGHDGLYQGLSTATKDTYDALH |
| | | MQALPPR |
| BCMA_EBB- | 243 | ATGGCCCTCCCTGTCACCGCCCTGCTGCTTCCGCTGGCTCTTCTGCTCCACGCCGCTC |
| C1978-G1-nt | | GGCCCGAAGTGCAACTGGTGGAAACCGGTGGCGGCCTGGTGCAGCCTGGAGGATCATT |
| Full CART | | GAGGCTGTCATGCGCGGCCAGCGGTATTACCTTCTCCCGGTACCCCATGTCCTGGGTC |
| | | AGACAGGCCCCGGGGAAAGGGCTTGAATGGGTGTCCGGGATCTCGGACTCCGGTGTCA |
| | | GCACTTACTACGCCGACTCCGCCAAGGGACGCTTCACCATTTCCCGGGACAACTCGAA |
| | | GAACACCCTGTTCCTCCAAATGAGCTCCCTCCGGGACGAGGATACTGCAGTGTACTAC |
| | | TGCGTGACCCGCGCCGGGTCCGAGGCGTCTGACATTTGGGGACAGGGCACTATGGTCA |
| | | CCGTGTCGTCCGGCGGAGGGGGCTCGGGAGGCGGTGGCAGCGGAGGAGGAGGGTCCGA |
| | | GATCGTGCTGACCCAATCCCCGGCCACCCTCTCGCTGAGCCCTGGAGAAAGGGCAACC |
| | | TTGTCCTGTCGCGCGAGCCAGTCCGTGAGCAACTCCCTGGCCTGGTACCAGCAGAAGC |
| | | CCGGACAGGCTCCGAGACTTCTGATCTACGACGCTTCGAGCCGGGCCACTGGAATCCC |
| | | CGACCGCTTTTCGGGGTCCGGCTCAGGAACCGATTTCACCCTGACAATCTCACGGCTG |
| | | GAGCCAGAGGATTTCGCCATCTATTACTGCCAGCAGTTCGGTACTTCCTCCGGCCTGA |
| | | CTTTCGGAGGCGGCACGAAGCTCGAAATCAAGACCACTACCCCAGCACCGAGGCCACC |
| | | CACCCCGGCTCCTACCATCGCCTCCCAGCCTCTGTCCCTGCGTCCGGAGGCATGTAGA |
| | | CCCGCAGCTGGTGGGGCCGTGCATACCCGGGGTCTTGACTTCGCCTGCGATATCTACA |
| | | TTTGGGCCCCTCTGGCTGGTACTTGCGGGGTCCTGCTGCTTTCACTCGTGATCACTCT |
| | | TTACTGTAAGCGCGGTCGGAAGAAGCTGCTGTACATCTTTAAGCAACCCTTCATGAGG |
| | | CCTGTGCAGACTACTCAAGAGGAGGACGGCTGTTCATGCCGGTTCCCAGAGGAGGAGG |
| | | AAGGCGGCTGCGAACTGCGCGTGAAATTCAGCCGCAGCGCAGATGCTCCAGCCTACAA |
| | | GCAGGGGCAGAACCAGCTCTACAACGAACTCAATCTTGGTCGGAGAGAGGAGTACGAC |
| | | GTGCTGGACAAGCGGAGAGGACGGGACCCAGAAATGGGCGGGAAGCCGCGCAGAAAGA |
| | | ATCCCCAAGAGGGCCTGTACAACGAGCTCCAAAAGGATAAGATGGCAGAAGCCTATAG |
| | | CGAGATTGGTATGAAAGGGGAACGCAGAAGAGGCAAAGGCCACGACGGACTGTACCAG |
| | | GGACTCAGCACCGCCACCAAGGACACCTATGACGCTCTTCACATGCAGGCCCTGCCGC |
| | | CTCGG |
| BCMA_EBB- | | |
| C1979-C1 | | |
| BCMA_EBB- | 139 | QVQLVESGGGLVQPGGSLRLSCAASGFTFSSYAMSWVRQAPGKGLEWVSAISGSGGST |
| C1979-C1-aa | | YYADSVKGRFTISRDNAKNSLYLQMNSLRAEDTAIYYCARATYKRELRYYYGMDVWGQ |
| ScFv domain | | GTMVTVSSGGGGSGGGGSGGGGSEIVMTQSPGTVSLSPGERATLSCRASQSVSSSFLA |
| | | WYQQKPGQAPRLLIYGASSRATGIPDRFSGSGSGTDFTLTISRLEPEDSAVYYCQQYH |
| | | SSPSWTFGQGTRLEIK |
| BCMA_EBB- | 160 | CAAGTGCAGCTCGTGGAATCGGGTGGCGGACTGGTGCAGCCGGGGGGCTCACTTAGAC |
| C1979-C1-nt | | TGTCCTGCGCGGCCAGCGGATTCACTTTCTCCTCCTACGCCATGTCCTGGGTCAGACA |
| ScFv domain | | GGCCCCTGGAAAGGGCCTGGAATGGGTGTCCGCAATCAGCGGCAGCGGCGGCTCGACC |
| | | TATTACGCGGATTCAGTGAAGGGCAGATTCACCATTTCCCGGGACAACGCCAAGAACT |
| | | CCTTGTACCTTCAAATGAACTCCCTCCGCGCGGAAGATACCGCAATCTACTACTGCGC |
| | | TCGGGCCACTTACAAGAGGGAACTGCGCTACTACTACGGGATGGACGTCTGGGGCCAG |
| | | GGAACCATGGTCACCGTGTCCAGCGGAGGAGGAGGATCGGGAGGAGGCGGTAGCGGGG |
| | | GTGGAGGGTCGGAGATCGTGATGACCCAGTCCCCCGGCACTGTGTCGCTGTCCCCCGG |
| | | CGAACGGGCCACCCTGTCATGTCGGGCCAGCCAGTCAGTGTCGTCAAGCTTCCTCGCC |
| | | TGGTACCAGCAGAAACCGGGACAAGCTCCCCGCCTGCTGATCTACGGAGCCAGCAGCC |
| | | GGGCCACCGGTATTCCTGACCGGTTCTCCGGTTCGGGGTCCGGGACCGACTTTACTCT |
| | | GACTATCTCTCGCCTCGAGCCAGAGGACTCCGCCGTGTATTACTGCCAGCAGTACCAC |
| | | TCCTCCCCGTCCTGGACGTTCGGACAGGGCACAAGGCTGGAGATTAAG |
| BCMA_EBB- | 181 | QVQLVESGGGLVQPGGSLRLSCAASGFTFSSYAMSWVRQAPGKGLEWVSAISGSGGST |
| C1979-C1-aa | | YYADSVKGRFTISRDNAKNSLYLQMNSLRAEDTAIYYCARATYKRELRYYYGMDVWGQ |
| VH | | GTMVTVSS |
| BCMA_EBB- | 202 | EIVMTQSPGTVSLSPGERATLSCRASQSVSSSFLAWYQQKPGQAPRLLIYGASSRATG |
| C1979-C1-aa | | IPDRFSGSGSGTDFTLTISRLEPEDSAVYYCQQYHSSPSWTFGQGTRLEIK |
| VL | | |
| BCMA_EBB- | 223 | MALPVTALLLPLALLLHAARPQVQLVESGGGLVQPGGSLRLSCAASGFTFSSYAMSWV |
| C1979-C1-aa | | RQAPGKGLEWVSAISGSGGSTYYADSVKGRFTISRDNAKNSLYLQMNSLRAEDTAIYY |
| Full CART | | CARATYKRELRYYYGMDVWGQGTMVTVSSGGGGSGGGGSGGGGSEIVMTQSPGTVSLS |
| | | PGERATLSCRASQSVSSSFLAWYQQKPGQAPRLLIYGASSRATGIPDRFSGSGSGTDF |
| | | TLTISRLEPEDSAVYYCQQYHSSPSWTFGQGTRLEIKTTTPAPRPPTPAPTIASQPLS |
| | | LRPEACRPAAGGAVHTRGLDFACDIYIWAPLAGTCGVLLLSLVITLYCKRGRKKLLYI |
| | | FKQPFMRPVQTTQEEDGCSCRFPEEEEGGCELRVKFSRSADAPAYKQGQNQLYNELNL |
| | | GRREEYDVLDKRRGRDPEMGGKPRRKNPQEGLYNELQKDKMAEAYSEIGMKGERRRGK |
| | | GHDGLYQGLSTATKDTYDALHMQALPPR |
| BCMA_EBB- | 244 | ATGGCCCTCCCTGTCACCGCCCTGCTGCTTCCGCTGGCTCTTCTGCTCCACGCCGCTC |
| C1979-C1-nt | | GGCCCCAAGTGCAGCTCGTGGAATCGGGTGGCGGACTGGTGCAGCCGGGGGGCTCACT |
| Full CART | | TAGACTGTCCTGCGCGGCCAGCGGATTCACTTTCTCCTCCTACGCCATGTCCTGGGTC |
| | | AGACAGGCCCCTGGAAAGGGCCTGGAATGGGTGTCCGCAATCAGCGGCAGCGGCGGCT |
| | | CGACCTATTACGCGGATTCAGTGAAGGGCAGATTCACCATTTCCCGGGACAACGCCAA |
| | | GAACTCCTTGTACCTTCAAATGAACTCCCTCCGCGCGGAAGATACCGCAATCTACTAC |
| | | TGCGCTCGGGCCACTTACAAGAGGGAACTGCGCTACTACTACGGGATGGACGTCTGGG |
| | | GCCAGGGAACCATGGTCACCGTGTCCAGCGGAGGAGGAGGATCGGGAGGAGGCGGTAG |
| | | CGGGGGTGGAGGGTCGGAGATCGTGATGACCCAGTCCCCCGGCACTGTGTCGCTGTCC |
| | | CCCGGCGAACGGGCCACCCTGTCATGTCGGGCCAGCCAGTCAGTGTCGTCAAGCTTCC |
| | | TCGCCTGGTACCAGCAGAAACCGGGACAAGCTCCCCGCCTGCTGATCTACGGAGCCAG |
| | | CAGCCGGGCCACCGGTATTCCTGACCGGTTCTCCGGTTCGGGGTCCGGGACCGACTTT |
| | | ACTCTGACTATCTCTCGCCTCGAGCCAGAGGACTCCGCCGTGTATTACTGCCAGCAGT |
| | | ACCACTCCTCCCCGTCCTGGACGTTCGGACAGGGCACAAGGCTGGAGATTAAGACCAC |
| | | TACCCCAGCACCGAGGCCACCCACCCCGGCTCCTACCATCGCCTCCCAGCCTCTGTCC |
| | | CTGCGTCCGGAGGCATGTAGACCCGCAGCTGGTGGGGCCGTGCATACCCGGGGTCTTG |
| | | ACTTCGCCTGCGATATCTACATTTGGGCCCCTCTGGCTGGTACTTGCGGGGTCCTGCT |
| | | GCTTTCACTCGTGATCACTCTTTACTGTAAGCGCGGTCGGAAGAAGCTGCTGTACATC |
| | | TTTAAGCAACCCTTCATGAGGCCTGTGCAGACTACTCAAGAGGAGGACGGCTGTTCAT |
| | | GCCGGTTCCCAGAGGAGGAGGAAGGCGGCTGCGAACTGCGCGTGAAATTCAGCCGCAG |
| | | CGCAGATGCTCCAGCCTACAAGCAGGGGCAGAACCAGCTCTACAACGAACTCAATCTT |
| | | GGTCGGAGAGAGGAGTACGACGTGCTGGACAAGCGGAGAGGACGGGACCCAGAAATGG |
| | | GCGGGAAGCCGCGCAGAAAGAATCCCCAAGAGGGCCTGTACAACGAGCTCCAAAAGGA |
| | | TAAGATGGCAGAAGCCTATAGCGAGATTGGTATGAAAGGGGAACGCAGAAGAGGCAAA |
| | | GGCCACGACGGACTGTACCAGGGACTCAGCACCGCCACCAAGGACACCTATGACGCTC |
| | | TTCACATGCAGGCCCTGCCGCCTCGG |
| BCMA_EBB- | | |
| C1978-C7 | | |
| BCMA_EBB- | 140 | EVQLVETGGGLVQPGGSLRLSCAASGFTFSSYAMSWVRQAPGKGLEWVSAISGSGGST |
| C1978-C7-aa | | YYADSVKGRFTISRDNSKNTLYLQMNTLKAEDTAVYYCARATYKRELRYYYGMDVWGQ |
| ScFv domain | | GTTVTVSSGGGGSGGGGSGGGGSEIVLTQSPSTLSLSPGESATLSCRASQSVSTTFLA |
| | | WYQQKPGQAPRLLIYGSSNRATGIPDRFSGSGSGTDFTLTIRRLEPEDFAVYYCQQYH |
| | | SSPSWTFGQGTKVEIK |
| BCMA_EBB- | 161 | GAGGTGCAGCTTGTGGAAACCGGTGGCGGACTGGTGCAGCCCGGAGGAAGCCTCAGGC |
| C1978-C7-nt | | TGTCCTGCGCCGCGTCCGGCTTCACCTTCTCCTCGTACGCCATGTCCTGGGTCCGCCA |
| ScFv domain | | GGCCCCCGGAAAGGGCCTGGAATGGGTGTCCGCCATCTCTGGAAGCGGAGGTTCCACG |
| | | TACTACGCGGACAGCGTCAAGGGAAGGTTCACAATCTCCCGCGATAATTCGAAGAACA |
| | | CTCTGTACCTTCAAATGAACACCCTGAAGGCCGAGGACACTGCTGTGTACTACTGCGC |
| | | ACGGGCCACCTACAAGAGAGAGCTCCGGTACTACTACGGAATGGACGTCTGGGGCCAG |
| | | GGAACTACTGTGACCGTGTCCTCGGGAGGGGGTGGCTCCGGGGGGGGCGGCTCCGGCG |
| | | GAGGCGGTTCCGAGATTGTGCTGACCCAGTCACCTTCAACTCTGTCGCTGTCCCCGGG |
| | | AGAGAGCGCTACTCTGAGCTGCCGGGCCAGCCAGTCCGTGTCCACCACCTTCCTCGCC |
| | | TGGTATCAGCAGAAGCCGGGGCAGGCACCACGGCTCTTGATCTACGGGTCAAGCAACA |
| | | GAGCGACCGGAATTCCTGACCGCTTCTCGGGGAGCGGTTCAGGCACCGACTTCACCCT |
| | | GACTATCCGGCGCCTGGAACCCGAAGATTTCGCCGTGTATTACTGTCAACAGTACCAC |
| | | TCCTCGCCGTCCTGGACCTTTGGCCAAGGAACCAAAGTGGAAATCAAG |
| BCMA_EBB- | 182 | EVQLVETGGGLVQPGGSLRLSCAASGFTFSSYAMSWVRQAPGKGLEWVSAISGSGGST |
| C1978-C7-aa | | YYADSVKGRFTISRDNSKNTLYLQMNTLKAEDTAVYYCARATYKRELRYYYGMDVWGQ |
| VH | | GTTVTVSS |
| BCMA_EBB- | 203 | EIVLTQSPSTLSLSPGESATLSCRASQSVSTTFLAWYQQKPGQAPRLLIYGSSNRATG |
| C1978-C7-aa | | IPDRFSGSGSGTDFTLTIRRLEPEDFAVYYCQQYHSSPSWTFGQGTKVEIK |
| VL | | |
| BCMA_EBB- | 224 | MALPVTALLLPLALLLHAARPEVQLVETGGGLVQPGGSLRLSCAASGFTFSSYAMSWV |
| C1978-C7-aa | | RQAPGKGLEWVSAISGSGGSTYYADSVKGRFTISRDNSKNTLYLQMNTLKAEDTAVYY |
| Full CART | | CARATYKRELRYYYGMDVWGQGTTVTVSSGGGGSGGGGSGGGGSEIVLTQSPSTLSLS |
| | | PGESATLSCRASQSVSTTFLAWYQQKPGQAPRLLIYGSSNRATGIPDRFSGSGSGTDF |
| | | TLTIRRLEPEDFAVYYCQQYHSSPSWTFGQGTKVEIKTTTPAPRPPTPAPTIASQPLS |
| | | LRPEACRPAAGGAVHTRGLDFACDIYIWAPLAGTCGVLLLSLVITLYCKRGRKKLLYI |
| | | FKQPFMRPVQTTQEEDGCSCRFPEEEEGGCELRVKFSRSADAPAYKQGQNQLYNELNL |
| | | GRREEYDVLDKRRGRDPEMGGKPRRKNPQEGLYNELQKDKMAEAYSEIGMKGERRRGK |
| | | GHDGLYQGLSTATKDTYDALHMQALPPR |
| BCMA_EBB- | 245 | ATGGCCCTCCCTGTCACCGCCCTGCTGCTTCCGCTGGCTCTTCTGCTCCACGCCGCTC |
| C1978-C7-nt | | GGCCCGAGGTGCAGCTTGTGGAAACCGGTGGCGGACTGGTGCAGCCCGGAGGAAGCCT |
| Full CART | | CAGGCTGTCCTGCGCCGCGTCCGGCTTCACCTTCTCCTCGTACGCCATGTCCTGGGTC |
| | | CGCCAGGCCCCCGGAAAGGGCCTGGAATGGGTGTCCGCCATCTCTGGAAGCGGAGGTT |
| | | CCACGTACTACGCGGACAGCGTCAAGGGAAGGTTCACAATCTCCCGCGATAATTCGAA |
| | | GAACACTCTGTACCTTCAAATGAACACCCTGAAGGCCGAGGACACTGCTGTGTACTAC |
| | | TGCGCACGGGCCACCTACAAGAGAGAGCTCCGGTACTACTACGGAATGGACGTCTGGG |
| | | GCCAGGGAACTACTGTGACCGTGTCCTCGGGAGGGGGTGGCTCCGGGGGGGGCGGCTC |
| | | CGGCGGAGGCGGTTCCGAGATTGTGCTGACCCAGTCACCTTCAACTCTGTCGCTGTCC |
| | | CCGGGAGAGAGCGCTACTCTGAGCTGCCGGGCCAGCCAGTCCGTGTCCACCACCTTCC |
| | | TCGCCTGGTATCAGCAGAAGCCGGGGCAGGCACCACGGCTCTTGATCTACGGGTCAAG |
| | | CAACAGAGCGACCGGAATTCCTGACCGCTTCTCGGGGAGCGGTTCAGGCACCGACTTC |
| | | ACCCTGACTATCCGGCGCCTGGAACCCGAAGATTTCGCCGTGTATTACTGTCAACAGT |
| | | ACCACTCCTCGCCGTCCTGGACCTTTGGCCAAGGAACCAAAGTGGAAATCAAGACCAC |
| | | TACCCCAGCACCGAGGCCACCCACCCCGGCTCCTACCATCGCCTCCCAGCCTCTGTCC |
| | | CTGCGTCCGGAGGCATGTAGACCCGCAGCTGGTGGGGCCGTGCATACCCGGGGTCTTG |
| | | ACTTCGCCTGCGATATCTACATTTGGGCCCCTCTGGCTGGTACTTGCGGGGTCCTGCT |
| | | GCTTTCACTCGTGATCACTCTTTACTGTAAGCGCGGTCGGAAGAAGCTGCTGTACATC |
| | | TTTAAGCAACCCTTCATGAGGCCTGTGCAGACTACTCAAGAGGAGGACGGCTGTTCAT |
| | | GCCGGTTCCCAGAGGAGGAGGAAGGCGGCTGCGAACTGCGCGTGAAATTCAGCCGCAG |
| | | CGCAGATGCTCCAGCCTACAAGCAGGGGCAGAACCAGCTCTACAACGAACTCAATCTT |
| | | GGTCGGAGAGAGGAGTACGACGTGCTGGACAAGCGGAGAGGACGGGACCCAGAAATGG |
| | | GCGGGAAGCCGCGCAGAAAGAATCCCCAAGAGGGCCTGTACAACGAGCTCCAAAAGGA |
| | | TAAGATGGCAGAAGCCTATAGCGAGATTGGTATGAAAGGGGAACGCAGAAGAGGCAAA |
| | | GGCCACGACGGACTGTACCAGGGACTCAGCACCGCCACCAAGGACACCTATGACGCTC |
| | | TTCACATGCAGGCCCTGCCGCCTCGG |
| BCMA_EBB- | | |
| C1978-D10 | | |
| BCMA_EBB- | 141 | EVQLVETGGGLVQPGRSLRLSCAASGFTFDDYAMHWVRQAPGKGLEWVSGISWNSGSI |
| C1978-D10-aa | | GYADSVKGRFTISRDNAKNSLYLQMNSLRDEDTAVYYCARVGKAVPDVWGQGTTVTVS |
| ScFv domain | | SGGGGSGGGGSGGGGSDIVMTQTPSSLSASVGDRVTITCRASQSISSYLNWYQQKPGK |
| | | APKLLIYAASSLQSGVPSRFSGSGSGTDFTLTISSLQPEDFATYYCQQSYSTPYSFGQ |
| | | GTRLEIK |
| BCMA_EBB- | 162 | GAAGTGCAGCTCGTGGAAACTGGAGGTGGACTCGTGCAGCCTGGACGGTCGCTGCGGC |
| C1978-D10-nt | | TGAGCTGCGCTGCATCCGGCTTCACCTTCGACGATTATGCCATGCACTGGGTCAGACA |
| ScFv domain | | GGCGCCAGGGAAGGGACTTGAGTGGGTGTCCGGTATCAGCTGGAATAGCGGCTCAATC |
| | | GGATACGCGGACTCCGTGAAGGGAAGGTTCACCATTTCCCGCGACAACGCCAAGAACT |
| | | CCCTGTACTTGCAAATGAACAGCCTCCGGGATGAGGACACTGCCGTGTACTACTGCGC |
| | | CCGCGTCGGAAAAGCTGTGCCCGACGTCTGGGGCCAGGGAACCACTGTGACCGTGTCC |
| | | AGCGGCGGGGGTGGATCGGGCGGTGGAGGGTCCGGTGGAGGGGGCTCAGATATTGTGA |
| | | TGACCCAGACCCCCTCGTCCCTGTCCGCCTCGGTCGGCGACCGCGTGACTATCACATG |
| | | TAGAGCCTCGCAGAGCATCTCCAGCTACCTGAACTGGTATCAGCAGAAGCCGGGGAAG |
| | | GCCCCGAAGCTCCTGATCTACGCGGCATCATCACTGCAATCGGGAGTGCCGAGCCGGT |
| | | TTTCCGGGTCCGGCTCCGGCACCGACTTCACGCTGACCATTTCTTCCCTGCAACCCGA |
| | | GGACTTCGCCACTTACTACTGCCAGCAGTCCTACTCCACCCCTTACTCCTTCGGCCAA |
| | | GGAACCAGGCTGGAAATCAAG |
| BCMA_EBB- | 183 | EVQLVETGGGLVQPGRSLRLSCAASGFTFDDYAMHWVRQAPGKGLEWVSGISWNSGSI |
| C1978-1D10-aa | | GYADSVKGRFTISRDNAKNSLYLQMNSLRDEDTAVYYCARVGKAVPDVWGQGTTVTVS |
| VH | | S |
| BCMA_EBB- | 204 | DIVMTQTPSSLSASVGDRVTITCRASQSISSYLNWYQQKPGKAPKLLIYAASSLQSGV |
| C1978-1D10-aa | | PSRFSGSGSGTDFTLTISSLQPEDFATYYCQQSYSTPYSFGQGTRLEIK |
| VL | | |
| BCMA_EBB- | 225 | MALPVTALLLPLALLLHAARPEVQLVETGGGLVQPGRSLRLSCAASGFTFDDYAMHWV |
| C1978-1D10-aa | | RQAPGKGLEWVSGISWNSGSIGYADSVKGRFTISRDNAKNSLYLQMNSLRDEDTAVYY |
| Full CART | | CARVGKAVPDVWGQGTTVTVSSGGGGSGGGGSGGGGSDIVMTQTPSSLSASVGDRVTI |
| | | TCRASQSISSYLNWYQQKPGKAPKLLIYAASSLQSGVPSRFSGSGSGTDFTLTISSLQ |
| | | PEDFATYYCQQSYSTPYSFGQGTRLEIKTTTPAPRPPTPAPTIASQPLSLRPEACRPA |
| | | AGGAVHTRGLDFACDIYIWAPLAGTCGVLLLSLVITLYCKRGRKKLLYIFKQPFMRPV |
| | | QTTQEEDGCSCRFPEEEEGGCELRVKFSRSADAPAYKQGQNQLYNELNLGRREEYDVL |
| | | DKRRGRDPEMGGKPRRKNPQEGLYNELQKDKMAEAYSEIGMKGERRRGKGHDGLYQGL |
| | | STATKDTYDALHMQALPPR |
| BCMA_EBB- | 246 | ATGGCCCTCCCTGTCACCGCCCTGCTGCTTCCGCTGGCTCTTCTGCTCCACGCCGCTC |
| C1978-1D10-nt | | GGCCCGAAGTGCAGCTCGTGGAAACTGGAGGTGGACTCGTGCAGCCTGGACGGTCGCT |
| Full CART | | GCGGCTGAGCTGCGCTGCATCCGGCTTCACCTTCGACGATTATGCCATGCACTGGGTC |
| | | AGACAGGCGCCAGGGAAGGGACTTGAGTGGGTGTCCGGTATCAGCTGGAATAGCGGCT |
| | | CAATCGGATACGCGGACTCCGTGAAGGGAAGGTTCACCATTTCCCGCGACAACGCCAA |
| | | GAACTCCCTGTACTTGCAAATGAACAGCCTCCGGGATGAGGACACTGCCGTGTACTAC |
| | | TGCGCCCGCGTCGGAAAAGCTGTGCCCGACGTCTGGGGCCAGGGAACCACTGTGACCG |
| | | TGTCCAGCGGCGGGGGTGGATCGGGCGGTGGAGGGTCCGGTGGAGGGGGCTCAGATAT |
| | | TGTGATGACCCAGACCCCCTCGTCCCTGTCCGCCTCGGTCGGCGACCGCGTGACTATC |
| | | ACATGTAGAGCCTCGCAGAGCATCTCCAGCTACCTGAACTGGTATCAGCAGAAGCCGG |
| | | GGAAGGCCCCGAAGCTCCTGATCTACGCGGCATCATCACTGCAATCGGGAGTGCCGAG |
| | | CCGGTTTTCCGGGTCCGGCTCCGGCACCGACTTCACGCTGACCATTTCTTCCCTGCAA |
| | | CCCGAGGACTTCGCCACTTACTACTGCCAGCAGTCCTACTCCACCCCTTACTCCTTCG |
| | | GCCAAGGAACCAGGCTGGAAATCAAGACCACTACCCCAGCACCGAGGCCACCCACCCC |
| | | GGCTCCTACCATCGCCTCCCAGCCTCTGTCCCTGCGTCCGGAGGCATGTAGACCCGCA |
| | | GCTGGTGGGGCCGTGCATACCCGGGGTCTTGACTTCGCCTGCGATATCTACATTTGGG |
| | | CCCCTCTGGCTGGTACTTGCGGGGTCCTGCTGCTTTCACTCGTGATCACTCTTTACTG |
| | | TAAGCGCGGTCGGAAGAAGCTGCTGTACATCTTTAAGCAACCCTTCATGAGGCCTGTG |
| | | CAGACTACTCAAGAGGAGGACGGCTGTTCATGCCGGTTCCCAGAGGAGGAGGAAGGCG |
| | | GCTGCGAACTGCGCGTGAAATTCAGCCGCAGCGCAGATGCTCCAGCCTACAAGCAGGG |
| | | GCAGAACCAGCTCTACAACGAACTCAATCTTGGTCGGAGAGAGGAGTACGACGTGCTG |
| | | GACAAGCGGAGAGGACGGGACCCAGAAATGGGCGGGAAGCCGCGCAGAAAGAATCCCC |
| | | AAGAGGGCCTGTACAACGAGCTCCAAAAGGATAAGATGGCAGAAGCCTATAGCGAGAT |
| | | TGGTATGAAAGGGGAACGCAGAAGAGGCAAAGGCCACGACGGACTGTACCAGGGACTC |
| | | AGCACCGCCACCAAGGACACCTATGACGCTCTTCACATGCAGGCCCTGCCGCCTCGG |
| BCMA_EBB- | | |
| C1979-C12 | | |
| BCMA_EBB- | 142 | EVQLVESGGGLVQPGRSLRLSCTASGFTFDDYAMHWVRQRPGKGLEWVASINWKGNSL |
| C1979-C12-aa | | AYGDSVKGRFAISRDNAKNTVFLQMNSLRTEDTAVYYCASHQGVAYYNYAMDVWGRGT |
| ScFv domain | | LVTVSSGGGGSGGGGSGGGGSEIVLTQSPGTLSLSPGERATLSCRATQSIGSSFLAWY |
| | | QQRPGQAPRLLIYGASQRATGIPDRFSGRGSGTDFTLTISRVEPEDSAVYYCQHYESS |
| | | PSWTFGQGTKVEIK |
| BCMA_EBB- | 163 | GAAGTGCAGCTCGTGGAGAGCGGGGGAGGATTGGTGCAGCCCGGAAGGTCCCTGCGGC |
| C1979-C12-nt | | TCTCCTGCACTGCGTCTGGCTTCACCTTCGACGACTACGCGATGCACTGGGTCAGACA |
| ScFv domain | | GCGCCCGGGAAAGGGCCTGGAATGGGTCGCCTCAATCAACTGGAAGGGAAACTCCCTG |
| | | GCCTATGGCGACAGCGTGAAGGGCCGCTTCGCCATTTCGCGCGACAACGCCAAGAACA |
| | | CCGTGTTTCTGCAAATGAATTCCCTGCGGACCGAGGATACCGCTGTGTACTACTGCGC |
| | | CAGCCACCAGGGCGTGGCATACTATAACTACGCCATGGACGTGTGGGGAAGAGGGACG |
| | | CTCGTCACCGTGTCCTCCGGGGGCGGTGGATCGGGTGGAGGAGGAAGCGGTGGCGGGG |
| | | GCAGCGAAATCGTGCTGACTCAGAGCCCGGGAACTCTTTCACTGTCCCCGGGAGAACG |
| | | GGCCACTCTCTCGTGCCGGGCCACCCAGTCCATCGGCTCCTCCTTCCTTGCCTGGTAC |
| | | CAGCAGAGGCCAGGACAGGCGCCCCGCCTGCTGATCTACGGTGCTTCCCAACGCGCCA |
| | | CTGGCATTCCTGACCGGTTCAGCGGCAGAGGGTCGGGAACCGATTTCACACTGACCAT |
| | | TTCCCGGGTGGAGCCCGAAGATTCGGCAGTCTACTACTGTCAGCATTACGAGTCCTCC |
| | | CCTTCATGGACCTTCGGTCAAGGGACCAAAGTGGAGATCAAG |
| BCMA_EBB- | 184 | EVQLVESGGGLVQPGRSLRLSCTASGFTFDDYAMHWVRQRPGKGLEWVASINWKGNSL |
| C1979-C12-aa | | AYGDSVKGRFAISRDNAKNTVFLQMNSLRTEDTAVYYCASHQGVAYYNYAMDVWGRGT |
| VH | | LVTVSS |
| BCMA_EBB- | 205 | EIVLTQSPGTLSLSPGERATLSCRATQSIGSSFLAWYQQRPGQAPRLLIYGASQRATG |
| C1979-C12-aa | | IPDRFSGRGSGTDFTLTISRVEPEDSAVYYCQHYESSPSWTFGQGTKVEIK |
| VL | | |
| BCMA_EBB- | 226 | MALPVTALLLPLALLLHAARPEVQLVESGGGLVQPGRSLRLSCTASGFTFDDYAMHWV |
| C1979-C12-aa | | RQRPGKGLEWVASINWKGNSLAYGDSVKGRFAISRDNAKNTVFLQMNSLRTEDTAVYY |
| Full CART | | CASHQGVAYYNYAMDVWGRGTLVTVSSGGGGSGGGGSGGGGSEIVLTQSPGTLSLSPG |
| | | ERATLSCRATQSIGSSFLAWYQQRPGQAPRLLIYGASQRATGIPDRFSGRGSGTDFTL |
| | | TISRVEPEDSAVYYCQHYESSPSWTFGQGTKVEIKTTTPAPRPPTPAPTIASQPLSLR |
| | | PEACRPAAGGAVHTRGLDFACDIYIWAPLAGTCGVLLLSLVITLYCKRGRKKLLYIFK |
| | | QPFMRPVQTTQEEDGCSCRFPEEEEGGCELRVKFSRSADAPAYKQGQNQLYNELNLGR |
| | | REEYDVLDKRRGRDPEMGGKPRRKNPQEGLYNELQKDKMAEAYSEIGMKGERRRGKGH |
| | | DGLYQGLSTATKDTYDALHMQALPPR |
| BCMA_EBB- | 247 | ATGGCCCTCCCTGTCACCGCCCTGCTGCTTCCGCTGGCTCTTCTGCTCCACGCCGCTC |
| C1979-C12-nt | | GGCCCGAAGTGCAGCTCGTGGAGAGCGGGGGAGGATTGGTGCAGCCCGGAAGGTCCCT |
| Full CART | | GCGGCTCTCCTGCACTGCGTCTGGCTTCACCTTCGACGACTACGCGATGCACTGGGTC |
| | | AGACAGCGCCCGGGAAAGGGCCTGGAATGGGTCGCCTCAATCAACTGGAAGGGAAACT |
| | | CCCTGGCCTATGGCGACAGCGTGAAGGGCCGCTTCGCCATTTCGCGCGACAACGCCAA |
| | | GAACACCGTGTTTCTGCAAATGAATTCCCTGCGGACCGAGGATACCGCTGTGTACTAC |
| | | TGCGCCAGCCACCAGGGCGTGGCATACTATAACTACGCCATGGACGTGTGGGGAAGAG |
| | | GGACGCTCGTCACCGTGTCCTCCGGGGGCGGTGGATCGGGTGGAGGAGGAAGCGGTGG |
| | | CGGGGGCAGCGAAATCGTGCTGACTCAGAGCCCGGGAACTCTTTCACTGTCCCCGGGA |
| | | GAACGGGCCACTCTCTCGTGCCGGGCCACCCAGTCCATCGGCTCCTCCTTCCTTGCCT |
| | | GGTACCAGCAGAGGCCAGGACAGGCGCCCCGCCTGCTGATCTACGGTGCTTCCCAACG |
| | | CGCCACTGGCATTCCTGACCGGTTCAGCGGCAGAGGGTCGGGAACCGATTTCACACTG |
| | | ACCATTTCCCGGGTGGAGCCCGAAGATTCGGCAGTCTACTACTGTCAGCATTACGAGT |
| | | CCTCCCCTTCATGGACCTTCGGTCAAGGGACCAAAGTGGAGATCAAGACCACTACCCC |
| | | AGCACCGAGGCCACCCACCCCGGCTCCTACCATCGCCTCCCAGCCTCTGTCCCTGCGT |
| | | CCGGAGGCATGTAGACCCGCAGCTGGTGGGGCCGTGCATACCCGGGGTCTTGACTTCG |
| | | CCTGCGATATCTACATTTGGGCCCCTCTGGCTGGTACTTGCGGGGTCCTGCTGCTTTC |
| | | ACTCGTGATCACTCTTTACTGTAAGCGCGGTCGGAAGAAGCTGCTGTACATCTTTAAG |
| | | CAACCCTTCATGAGGCCTGTGCAGACTACTCAAGAGGAGGACGGCTGTTCATGCCGGT |
| | | TCCCAGAGGAGGAGGAAGGCGGCTGCGAACTGCGCGTGAAATTCAGCCGCAGCGCAGA |
| | | TGCTCCAGCCTACAAGCAGGGGCAGAACCAGCTCTACAACGAACTCAATCTTGGTCGG |
| | | AGAGAGGAGTACGACGTGCTGGACAAGCGGAGAGGACGGGACCCAGAAATGGGCGGGA |
| | | AGCCGCGCAGAAAGAATCCCCAAGAGGGCCTGTACAACGAGCTCCAAAAGGATAAGAT |
| | | GGCAGAAGCCTATAGCGAGATTGGTATGAAAGGGGAACGCAGAAGAGGCAAAGGCCAC |
| | | GACGGACTGTACCAGGGACTCAGCACCGCCACCAAGGACACCTATGACGCTCTTCACA |
| | | TGCAGGCCCTGCCGCCTCGG |
| BCMA_EBB- | | |
| C1980-G4 | | |
| BCMA_EBB- | 143 | EVQLVESGGGLVQPGGSLRLSCAASGFTFSSYAMSWVRQAPGKGLEWVSAIS |
| C1980-G4-aa | | GSGGSTYYADSVKGRFTISRDNSKNTLYLQMNSLRAEDTAVYYCAKVVRDG |
| ScFv domain | | MDVWGQGTTVTVSSGGGGSGGGGSGGGGSEIVLTQSPATLSLSPGERATLSCR |
| | | ASQSVSSSYLAWYQQKPGQAPRLLIYGASSRATGIPDRFSGNGSGTDFTLTISR |
| | | LEPEDFAVYYCQQYGSPPRFTFGPGTKVDIK |
| BCMA_EBB- | 164 | GAGGTGCAGTTGGTCGAAAGCGGGGGCGGGCTTGTGCAGCCTGGCGGATCACTGCGGC |
| C1980-G4-nt | | TGTCCTGCGCGGCATCAGGCTTCACGTTTTCTTCCTACGCCATGTCCTGGGTGCGCCA |
| ScFv domain | | GGCCCCTGGAAAGGGACTGGAATGGGTGTCCGCGATTTCGGGGTCCGGCGGGAGCACC |
| | | TACTACGCCGATTCCGTGAAGGGCCGCTTCACTATCTCGCGGGACAACTCCAAGAACA |
| | | CCCTCTACCTCCAAATGAATAGCCTGCGGGCCGAGGATACCGCCGTCTACTATTGCGC |
| | | TAAGGTCGTGCGCGACGGAATGGACGTGTGGGGACAGGGTACCACCGTGACAGTGTCC |
| | | TCGGGGGGAGGCGGTAGCGGCGGAGGAGGAAGCGGTGGTGGAGGTTCCGAGATTGTGC |
| | | TGACTCAATCACCCGCGACCCTGAGCCTGTCCCCCGGCGAAAGGGCCACTCTGTCCTG |
| | | TCGGGCCAGCCAATCAGTCTCCTCCTCGTACCTGGCCTGGTACCAGCAGAAGCCAGGA |
| | | CAGGCTCCGAGACTCCTTATCTATGGCGCATCCTCCCGCGCCACCGGAATCCCGGATA |
| | | GGTTCTCGGGAAACGGATCGGGGACCGACTTCACTCTCACCATCTCCCGGCTGGAACC |
| | | GGAGGACTTCGCCGTGTACTACTGCCAGCAGTACGGCAGCCCGCCTAGATTCACTTTC |
| | | GGCCCCGGCACCAAAGTGGACATCAAG |
| BCMA_EBB- | 185 | EVQLVESGGGLVQPGGSLRLSCAASGFTFSSYAMSWVRQAPGKGLEWVSAISGSGGST |
| C1980-G4-aa | | YYADSVKGRFTISRDNSKNTLYLQMNSLRAEDTAVYYCAKVVRDGMDVWGQGTTVTVS |
| VH | | S |
| BCMA_EBB- | 206 | EIVLTQSPATLSLSPGERATLSCRASQSVSSSYLAWYQQKPGQAPRLLIYGASSRATG |
| C1980-G4-aa | | IPDRFSGNGSGTDFTLTISRLEPEDFAVYYCQQYGSPPRFTFGPGTKVDIK |
| VL | | |
| BCMA_EBB- | 227 | MALPVTALLLPLALLLHAARPEVQLVESGGGLVQPGGSLRLSCAASGFTFSSY |
| C1980-G4-aa | | AMSWVRQAPGKGLEWVSAISGSGGSTYYADSVKGRFTISRDNSKNTLYLQMN |
| Full CART | | SLRAEDTAVYYCAKVVRDGMDVWGQGTTVTVSSGGGGSGGGGSGGGGSEIV |
| | | LTQSPATLSLSPGERATLSCRASQSVSSSYLAWYQQKPGQAPRLLIYGASSRAT |
| | | GIPDRFSGNGSGTDFTLTISRLEPEDFAVYYCQQYGSPPRFTFGPGTKVDIKTTT |
| | | PAPRPPTPAPTIASQPLSLRPEACRPAAGGAVHTRGLDFACDIYIWAPLAGTCG |
| | | VLLLSLVITLYCKRGRKKLLYIFKQPFMRPVQTTQLEDGCSCRFPEELEGGCEL |
| | | RVKFSRSADAPAYKQGQNQLYNELNLGRREEYDVLDKRRGRDPEMGGKPRR |
| | | KNPQEGLYNELQKDKMALAYSEIGMKGERRRGKGHDGLYQGLSTATKDTYD |
| | | ALHMQALPPR |
| BCMA_EBB- | 248 | ATGGCCCTCCCTGTCACCGCCCTGCTGCTTCCGCTGGCTCTTCTGCTCCACGCCGCTC |
| C1980-G4-nt | | GGCCCGAGGTGCAGTTGGTCGAAAGCGGGGGCGGGCTTGTGCAGCCTGGCGGATCACT |
| Full CART | | GCGGCTGTCCTGCGCGGCATCAGGCTTCACGTTTTCTTCCTACGCCATGTCCTGGGTG |
| | | CGCCAGGCCCCTGGAAAGGGACTGGAATGGGTGTCCGCGATTTCGGGGTCCGGCGGGA |
| | | GCACCTACTACGCCGATTCCGTGAAGGGCCGCTTCACTATCTCGCGGGACAACTCCAA |
| | | GAACACCCTCTACCTCCAAATGAATAGCCTGCGGGCCGAGGATACCGCCGTCTACTAT |
| | | TGCGCTAAGGTCGTGCGCGACGGAATGGACGTGTGGGGACAGGGTACCACCGTGACAG |
| | | TGTCCTCGGGGGGAGGCGGTAGCGGCGGAGGAGGAAGCGGTGGTGGAGGTTCCGAGAT |
| | | TGTGCTGACTCAATCACCCGCGACCCTGAGCCTGTCCCCCGGCGAAAGGGCCACTCTG |
| | | TCCTGTCGGGCCAGCCAATCAGTCTCCTCCTCGTACCTGGCCTGGTACCAGCAGAAGC |
| | | CAGGACAGGCTCCGAGACTCCTTATCTATGGCGCATCCTCCCGCGCCACCGGAATCCC |
| | | GGATAGGTTCTCGGGAAACGGATCGGGGACCGACTTCACTCTCACCATCTCCCGGCTG |
| | | GAACCGGAGGACTTCGCCGTGTACTACTGCCAGCAGTACGGCAGCCCGCCTAGATTCA |
| | | CTTTCGGCCCCGGCACCAAAGTGGACATCAAGACCACTACCCCAGCACCGAGGCCACC |
| | | CACCCCGGCTCCTACCATCGCCTCCCAGCCTCTGTCCCTGCGTCCGGAGGCATGTAGA |
| | | CCCGCAGCTGGTGGGGCCGTGCATACCCGGGGTCTTGACTTCGCCTGCGATATCTACA |
| | | TTTGGGCCCCTCTGGCTGGTACTTGCGGGGTCCTGCTGCTTTCACTCGTGATCACTCT |
| | | TTACTGTAAGCGCGGTCGGAAGAAGCTGCTGTACATCTTTAAGCAACCCTTCATGAGG |
| | | CCTGTGCAGACTACTCAAGAGGAGGACGGCTGTTCATGCCGGTTCCCAGAGGAGGAGG |
| | | AAGGCGGCTGCGAACTGCGCGTGAAATTCAGCCGCAGCGCAGATGCTCCAGCCTACAA |
| | | GCAGGGGCAGAACCAGCTCTACAACGAACTCAATCTTGGTCGGAGAGAGGAGTACGAC |
| | | GTGCTGGACAAGCGGAGAGGACGGGACCCAGAAATGGGCGGGAAGCCGCGCAGAAAGA |
| | | ATCCCCAAGAGGGCCTGTACAACGAGCTCCAAAAGGATAAGATGGCAGAAGCCTATAG |
| | | CGAGATTGGTATGAAAGGGGAACGCAGAAGAGGCAAAGGCCACGACGGACTGTACCAG |
| | | GGACTCAGCACCGCCACCAAGGACACCTATGACGCTCTTCACATGCAGGCCCTGCCGC |
| | | CTCGG |
| BCMA_EBB- | | |
| C1980-D2 | | |
| BCMA_EBB- | 144 | EVQLLESGGGLVQPGGSLRLSCAASGFTFSSYAMSWVRQAPGKGLEWVSAISGSGGST |
| C1980-D2-aa | | YYADSVKGRFTISRDNSKNTLYLQMNSLRAEDTAVYYCAKIPQTGTFDYWGQGTLVTV |
| ScFv domain | | SSGGGGSGGGGSGGGGSEIVLTQSPGTLSLSPGERATLSCRASQSVSSSYLAWYQQRP |
| | | GQAPRLLIYGASSRATGIPDRFSGSGSGTDFTLTISRLEPEDFAVYYCQHYGSSPSWT |
| | | FGQGTRLEIK |
| BCMA_EBB- | 165 | GAAGTGCAGCTGCTGGAGTCCGGCGGTGGATTGGTGCAACCGGGGGGATCGCTCAGAC |
| C1980-D2-nt | | TGTCCTGTGCGGCGTCAGGCTTCACCTTCTCGAGCTACGCCATGTCATGGGTCAGACA |
| ScFv domain | | GGCCCCTGGAAAGGGTCTGGAATGGGTGTCCGCCATTTCCGGGAGCGGGGGATCTACA |
| | | TACTACGCCGATAGCGTGAAGGGCCGCTTCACCATTTCCCGGGACAACTCCAAGAACA |
| | | CTCTCTATCTGCAAATGAACTCCCTCCGCGCTGAGGACACTGCCGTGTACTACTGCGC |
| | | CAAAATCCCTCAGACCGGCACCTTCGACTACTGGGGACAGGGGACTCTGGTCACCGTC |
| | | AGCAGCGGTGGCGGAGGTTCGGGGGGAGGAGGAAGCGGCGGCGGAGGGTCCGAGATTG |
| | | TGCTGACCCAGTCACCCGGCACTTTGTCCCTGTCGCCTGGAGAAAGGGCCACCCTTTC |
| | | CTGCCGGGCATCCCAATCCGTGTCCTCCTCGTACCTGGCCTGGTACCAGCAGAGGCCC |
| | | GGACAGGCCCCACGGCTTCTGATCTACGGAGCAAGCAGCCGCGCGACCGGTATCCCGG |
| | | ACCGGTTTTCGGGCTCGGGCTCAGGAACTGACTTCACCCTCACCATCTCCCGCCTGGA |
| | | ACCCGAAGATTTCGCTGTGTATTACTGCCAGCACTACGGCAGCTCCCCGTCCTGGACG |
| | | TTCGGCCAGGGAACTCGGCTGGAGATCAAG |
| BCMA_EBB- | 186 | EVQLLESGGGLVQPGGSLRLSCAASGFTFSSYAMSWVRQAPGKGLEWVSAISGSGGST |
| C1980-D2-aa | | YYADSVKGRFTISRDNSKNTLYLQMNSLRAEDTAVYYCAKIPQTGTFDYWGQGTLVTV |
| VH | | SS |
| BCMA_EBB- | 207 | EIVLTQSPGTLSLSPGERATLSCRASQSVSSSYLAWYQQRPGQAPRLLIYGASSRATG |
| C1980-D2-aa | | IPDRFSGSGSGTDFTLTISRLEPEDFAVYYCQHYGSSPSWTFGQGTRLEIK |
| VL | | |
| BCMA_EBB- | 228 | MALPVTALLLPLALLLHAARPEVQLLESGGGLVQPGGSLRLSCAASGFTFSSYAMSWV |
| C1980-D2-aa | | RQAPGKGLEWVSAISGSGGSTYYADSVKGRFTISRDNSKNTLYLQMNSLRAEDTAVYY |
| Full CART | | CAKIPQTGTFDYWGQGTLVTVSSGGGGSGGGGSGGGGSEIVLTQSPGTLSLSPGERAT |
| | | LSCRASQSVSSSYLAWYQQRPGQAPRLLIYGASSRATGIPDRFSGSGSGTDFTLTISR |
| | | LEPEDFAVYYCQHYGSSPSWTFGQGTRLEIKTTTPAPRPPTPAPTIASQPLSLRPEAC |
| | | RPAAGGAVHTRGLDFACDIYIWAPLAGTCGVLLLSLVITLYCKRGRKKLLYIFKQPFM |
| | | RPVQTTQEEDGCSCRFPEEEEGGCELRVKFSRSADAPAYKQGQNQLYNELNLGRREEY |
| | | DVLDKRRGRDPEMGGKPRRKNPQEGLYNELQKDKMAEAYSEIGMKGERRRGKGHDGLY |
| | | QGLSTATKDTYDALHMQALPPR |
| BCMA_EBB- | 249 | ATGGCCCTCCCTGTCACCGCCCTGCTGCTTCCGCTGGCTCTTCTGCTCCACGCCGCTC |
| C1980-D2-nt | | GGCCCGAAGTGCAGCTGCTGGAGTCCGGCGGTGGATTGGTGCAACCGGGGGGATCGCT |
| Full CART | | CAGACTGTCCTGTGCGGCGTCAGGCTTCACCTTCTCGAGCTACGCCATGTCATGGGTC |
| | | AGACAGGCCCCTGGAAAGGGTCTGGAATGGGTGTCCGCCATTTCCGGGAGCGGGGGAT |
| | | CTACATACTACGCCGATAGCGTGAAGGGCCGCTTCACCATTTCCCGGGACAACTCCAA |
| | | GAACACTCTCTATCTGCAAATGAACTCCCTCCGCGCTGAGGACACTGCCGTGTACTAC |
| | | TGCGCCAAAATCCCTCAGACCGGCACCTTCGACTACTGGGGACAGGGGACTCTGGTCA |
| | | CCGTCAGCAGCGGTGGCGGAGGTTCGGGGGGAGGAGGAAGCGGCGGCGGAGGGTCCGA |
| | | GATTGTGCTGACCCAGTCACCCGGCACTTTGTCCCTGTCGCCTGGAGAAAGGGCCACC |
| | | CTTTCCTGCCGGGCATCCCAATCCGTGTCCTCCTCGTACCTGGCCTGGTACCAGCAGA |
| | | GGCCCGGACAGGCCCCACGGCTTCTGATCTACGGAGCAAGCAGCCGCGCGACCGGTAT |
| | | CCCGGACCGGTTTTCGGGCTCGGGCTCAGGAACTGACTTCACCCTCACCATCTCCCGC |
| | | CTGGAACCCGAAGATTTCGCTGTGTATTACTGCCAGCACTACGGCAGCTCCCCGTCCT |
| | | GGACGTTCGGCCAGGGAACTCGGCTGGAGATCAAGACCACTACCCCAGCACCGAGGCC |
| | | ACCCACCCCGGCTCCTACCATCGCCTCCCAGCCTCTGTCCCTGCGTCCGGAGGCATGT |
| | | AGACCCGCAGCTGGTGGGGCCGTGCATACCCGGGGTCTTGACTTCGCCTGCGATATCT |
| | | ACATTTGGGCCCCTCTGGCTGGTACTTGCGGGGTCCTGCTGCTTTCACTCGTGATCAC |
| | | TCTTTACTGTAAGCGCGGTCGGAAGAAGCTGCTGTACATCTTTAAGCAACCCTTCATG |
| | | AGGCCTGTGCAGACTACTCAAGAGGAGGACGGCTGTTCATGCCGGTTCCCAGAGGAGG |
| | | AGGAAGGCGGCTGCGAACTGCGCGTGAAATTCAGCCGCAGCGCAGATGCTCCAGCCTA |
| | | CAAGCAGGGGCAGAACCAGCTCTACAACGAACTCAATCTTGGTCGGAGAGAGGAGTAC |
| | | GACGTGCTGGACAAGCGGAGAGGACGGGACCCAGAAATGGGCGGGAAGCCGCGCAGAA |
| | | AGAATCCCCAAGAGGGCCTGTACAACGAGCTCCAAAAGGATAAGATGGCAGAAGCCTA |
| | | TAGCGAGATTGGTATGAAAGGGGAACGCAGAAGAGGCAAAGGCCACGACGGACTGTAC |
| | | CAGGGACTCAGCACCGCCACCAAGGACACCTATGACGCTCTTCACATGCAGGCCCTGC |
| | | CGCCTCGG |
| BCMA_EBB- | | |
| C1978-A10 | | |
| BCMA_EBB- | 145 | EVQLVETGGGLVQPGGSLRLSCAASGFTFSSYAMSWVRQAPGKGLEWVSAIS |
| C1978-A10-aa | | GSGGSTYYADSVKGRFTMSRENDKNSVFLQMNSLRVEDTGVYYCARANYKR |
| ScFv domain | | ELRYYYGMDVWGQGTMVTVSSGGGGSGGGGSGGGGSEIVMTQSPGTLSLSP |
| | | GESATLSCRASQRVASNYLAWYQHKPGQAPSLLISGASSRATGVPDRFSGSGS |
| | | GTDFTLAISRLEPEDSAVYYCQHYDSSPSWTFGQGTKVEIK |
| BCMA_EBB- | 166 | GAAGTGCAACTGGTGGAAACCGGTGGAGGACTCGTGCAGCCTGGCGGCAGCCTCCGGC |
| C1978-A10-nt | | TGAGCTGCGCCGCTTCGGGATTCACCTTTTCCTCCTACGCGATGTCTTGGGTCAGACA |
| ScFv domain | | GGCCCCCGGAAAGGGGCTGGAATGGGTGTCAGCCATCTCCGGCTCCGGCGGATCAACG |
| | | TACTACGCCGACTCCGTGAAAGGCCGGTTCACCATGTCGCGCGAGAATGACAAGAACT |
| | | CCGTGTTCCTGCAAATGAACTCCCTGAGGGTGGAGGACACCGGAGTGTACTATTGTGC |
| | | GCGCGCCAACTACAAGAGAGAGCTGCGGTACTACTACGGAATGGACGTCTGGGGACAG |
| | | GGAACTATGGTGACCGTGTCATCCGGTGGAGGGGGAAGCGGCGGTGGAGGCAGCGGGG |
| | | GCGGGGGTTCAGAAATTGTCATGACCCAGTCCCCGGGAACTCTTTCCCTCTCCCCCGG |
| | | GGAATCCGCGACTTTGTCCTGCCGGGCCAGCCAGCGCGTGGCCTCGAACTACCTCGCA |
| | | TGGTACCAGCATAAGCCAGGCCAAGCCCCTTCCCTGCTGATTTCCGGGGCTAGCAGCC |
| | | GCGCCACTGGCGTGCCGGATAGGTTCTCGGGAAGCGGCTCGGGTACCGATTTCACCCT |
| | | GGCAATCTCGCGGCTGGAACCGGAGGATTCGGCCGTGTACTACTGCCAGCACTATGAC |
| | | TCATCCCCCTCCTGGACATTCGGACAGGGCACCAAGGTCGAGATCAAG |
| BCMA_EBB- | 187 | EVQLVETGGGLVQPGGSLRLSCAASGFTFSSYAMSWVRQAPGKGLEWVSAISGSGGST |
| C1978-A10-aa | | YYADSVKGRFTMSRENDKNSVFLQMNSLRVEDTGVYYCARANYKRELRYYYGMDVWGQ |
| VH | | GTMVTVSS |
| BCMA_EBB- | 208 | EIVMTQSPGTLSLSPGESATLSCRASQRVASNYLAWYQHKPGQAPSLLISGASSRATG |
| C1978-A10-aa | | VPDRFSGSGSGTDFTLAISRLEPEDSAVYYCQHYDSSPSWTFGQGTKVEIK |
| VL | | |
| BCMA_EBB- | 229 | MALPVTALLLPLALLLHAARPEVQLVETGGGLVQPGGSLRLSCAASGFTFSSY |
| C1978-A10-aa | | AMSWVRQAPGKGLEWVSAISGSGGSTYYADSVKGRFTMSRENDKNSVFLQM |
| Full CART | | NSLRVEDTGVYYCARANYKRELRYYYGMDVWGQGTMVTVSSGGGGSGGGG |
| | | SGGGGSEIVMTQSPGTLSLSPGESATLSCRASQRVASNYLAWYQHKPGQAPSL |
| | | LISGASSRATGVPDRFSGSGSGTDFTLAISRLEPEDSAVYYCQHYDSSPSWTFG |
| | | QGTKVEIKTTTPAPRPPTPAPTIASQPLSLRPEACRPAAGGAVHTRGLDFACDIY |
| | | IWAPLAGTCGVLLLSLVITLYCKRGRKKLLYIFKQPFMRPVQTTQEEDGCSCRF |
| | | PEEEEGGCELRVKFSRSADAPAYKQGQNQLYNELNLGRREEYDVLDKRRGRD |
| | | PEMGGKPRRKNPQEGLYNELQKDKMAEAYSEIGMKGERRRGKGHDGLYQGL |
| | | STATKDTYDALHMQALPPR |
| BCMA_EBB- | 250 | ATGGCCCTCCCTGTCACCGCCCTGCTGCTTCCGCTGGCTCTTCTGCTCCACGCCGCTC |
| C1978-A10-nt | | GGCCCGAAGTGCAACTGGTGGAAACCGGTGGAGGACTCGTGCAGCCTGGCGGCAGCCT |
| Full CART | | CCGGCTGAGCTGCGCCGCTTCGGGATTCACCTTTTCCTCCTACGCGATGTCTTGGGTC |
| | | AGACAGGCCCCCGGAAAGGGGCTGGAATGGGTGTCAGCCATCTCCGGCTCCGGCGGAT |
| | | CAACGTACTACGCCGACTCCGTGAAAGGCCGGTTCACCATGTCGCGCGAGAATGACAA |
| | | GAACTCCGTGTTCCTGCAAATGAACTCCCTGAGGGTGGAGGACACCGGAGTGTACTAT |
| | | TGTGCGCGCGCCAACTACAAGAGAGAGCTGCGGTACTACTACGGAATGGACGTCTGGG |
| | | GACAGGGAACTATGGTGACCGTGTCATCCGGTGGAGGGGGAAGCGGCGGTGGAGGCAG |
| | | CGGGGGCGGGGGTTCAGAAATTGTCATGACCCAGTCCCCGGGAACTCTTTCCCTCTCC |
| | | CCCGGGGAATCCGCGACTTTGTCCTGCCGGGCCAGCCAGCGCGTGGCCTCGAACTACC |
| | | TCGCATGGTACCAGCATAAGCCAGGCCAAGCCCCTTCCCTGCTGATTTCCGGGGCTAG |
| | | CAGCCGCGCCACTGGCGTGCCGGATAGGTTCTCGGGAAGCGGCTCGGGTACCGATTTC |
| | | ACCCTGGCAATCTCGCGGCTGGAACCGGAGGATTCGGCCGTGTACTACTGCCAGCACT |
| | | ATGACTCATCCCCCTCCTGGACATTCGGACAGGGCACCAAGGTCGAGATCAAGACCAC |
| | | TACCCCAGCACCGAGGCCACCCACCCCGGCTCCTACCATCGCCTCCCAGCCTCTGTCC |
| | | CTGCGTCCGGAGGCATGTAGACCCGCAGCTGGTGGGGCCGTGCATACCCGGGGTCTTG |
| | | ACTTCGCCTGCGATATCTACATTTGGGCCCCTCTGGCTGGTACTTGCGGGGTCCTGCT |
| | | GCTTTCACTCGTGATCACTCTTTACTGTAAGCGCGGTCGGAAGAAGCTGCTGTACATC |
| | | TTTAAGCAACCCTTCATGAGGCCTGTGCAGACTACTCAAGAGGAGGACGGCTGTTCAT |
| | | GCCGGTTCCCAGAGGAGGAGGAAGGCGGCTGCGAACTGCGCGTGAAATTCAGCCGCAG |
| | | CGCAGATGCTCCAGCCTACAAGCAGGGGCAGAACCAGCTCTACAACGAACTCAATCTT |
| | | GGTCGGAGAGAGGAGTACGACGTGCTGGACAAGCGGAGAGGACGGGACCCAGAAATGG |
| | | GCGGGAAGCCGCGCAGAAAGAATCCCCAAGAGGGCCTGTACAACGAGCTCCAAAAGGA |
| | | TAAGATGGCAGAAGCCTATAGCGAGATTGGTATGAAAGGGGAACGCAGAAGAGGCAAA |
| | | GGCCACGACGGACTGTACCAGGGACTCAGCACCGCCACCAAGGACACCTATGACGCTC |
| | | TTCACATGCAGGCCCTGCCGCCTCGG |
| BCMA_EBB- | | |
| C1978-D4 | | |
| BCMA_EBB- | 146 | EVQLLETGGGLVQPGGSLRLSCAASGFSFSSYAMSWVRQAPGKGLEWVSAISGSGGST |
| C1978-D4-aa | | YYADSVKGRFTISRDNSKNTLYLQMNSLRAEDTAVYYCAKALVGATGAFDIWGQGTLV |
| ScFv domain | | TVSSGGGGSGGGGSGGGGSEIVLTQSPGTLSLSPGERATLSCRASQSLSSNFLAWYQQ |
| | | KPGQAPGLLIYGASNWATGTPDRFSGSGSGTDFTLTITRLEPEDFAVYYCQYYGTSPM |
| | | YTFGQGTKVEIK |
| BCMA_EBB- | 167 | GAAGTGCAGCTGCTCGAAACCGGTGGAGGGCTGGTGCAGCCAGGGGGCTCCCTGAGGC |
| C1978-D4-nt | | TTTCATGCGCCGCTAGCGGATTCTCCTTCTCCTCTTACGCCATGTCGTGGGTCCGCCA |
| ScFv domain | | AGCCCCTGGAAAAGGCCTGGAATGGGTGTCCGCGATTTCCGGGAGCGGAGGTTCGACC |
| | | TATTACGCCGACTCCGTGAAGGGCCGCTTTACCATCTCCCGGGATAACTCCAAGAACA |
| | | CTCTGTACCTCCAAATGAACTCGCTGAGAGCCGAGGACACCGCCGTGTATTACTGCGC |
| | | GAAGGCGCTGGTCGGCGCGACTGGGGCATTCGACATCTGGGGACAGGGAACTCTTGTG |
| | | ACCGTGTCGAGCGGAGGCGGCGGCTCCGGCGGAGGAGGGAGCGGGGGCGGTGGTTCCG |
| | | AAATCGTGTTGACTCAGTCCCCGGGAACCCTGAGCTTGTCACCCGGGGAGCGGGCCAC |
| | | TCTCTCCTGTCGCGCCTCCCAATCGCTCTCATCCAATTTCCTGGCCTGGTACCAGCAG |
| | | AAGCCCGGACAGGCCCCGGGCCTGCTCATCTACGGCGCTTCAAACTGGGCAACGGGAA |
| | | CCCCTGATCGGTTCAGCGGAAGCGGATCGGGTACTGACTTTACCCTGACCATCACCAG |
| | | ACTGGAACCGGAGGACTTCGCCGTGTACTACTGCCAGTACTACGGCACCTCCCCCATG |
| | | TACACATTCGGACAGGGTACCAAGGTCGAGATTAAG |
| BCMA_EBB- | 188 | EVQLLETGGGLVQPGGSLRLSCAASGFSFSSYAMSWVRQAPGKGLEWVSAISGSGGST |
| C1978-D4-aa | | YYADSVKGRFTISRDNSKNTLYLQMNSLRAEDTAVYYCAKALVGATGAFDIWGQGTLV |
| VH | | TVSS |
| BCMA_EBB- | 209 | EIVLTQSPGTLSLSPGERATLSCRASQSLSSNFLAWYQQKPGQAPGLLIYGASNWATG |
| C1978-D4-aa | | TPDRFSGSGSGTDFTLTITRLEPEDFAVYYCQYYGTSPMYTFGQGTKVEIK |
| VL | | |
| BCMA_EBB- | 230 | MALPVTALLLPLALLLHAARPEVQLLETGGGLVQPGGSLRLSCAASGFSFSSYAMSWV |
| C1978-D4-aa | | RQAPGKGLEWVSAISGSGGSTYYADSVKGRFTISRDNSKNTLYLQMNSLRAEDTAVYY |
| Full CART | | CAKALVGATGAFDIWGQGTLVTVSSGGGGSGGGGSGGGGSEIVLTQSPGTLSLSPGER |
| | | ATLSCRASQSLSSNFLAWYQQKPGQAPGLLIYGASNWATGTPDRFSGSGSGTDFTLTI |
| | | TRLEPEDFAVYYCQYYGTSPMYTFGQGTKVEIKTTTPAPRPPTPAPTIASQPLSLRPE |
| | | ACRPAAGGAVHTRGLDFACDIYIWAPLAGTCGVLLLSLVITLYCKRGRKKLLYIFKQP |
| | | FMRPVQTTQEEDGCSCRFPEEEEGGCELRVKFSRSADAPAYKQGQNQLYNELNLGRRE |
| | | EYDVLDKRRGRDPEMGGKPRRKNPQEGLYNELQKDKMAEAYSEIGMKGERRRGKGHDG |
| | | LYQGLSTATKDTYDALHMQALPPR |
| BCMA_EBB- | 251 | ATGGCCCTCCCTGTCACCGCCCTGCTGCTTCCGCTGGCTCTTCTGCTCCACGCCGCTC |
| C1978-D4-nt | | GGCCCGAAGTGCAGCTGCTCGAAACCGGTGGAGGGCTGGTGCAGCCAGGGGGCTCCCT |
| Full CART | | GAGGCTTTCATGCGCCGCTAGCGGATTCTCCTTCTCCTCTTACGCCATGTCGTGGGTC |
| | | CGCCAAGCCCCTGGAAAAGGCCTGGAATGGGTGTCCGCGATTTCCGGGAGCGGAGGTT |
| | | CGACCTATTACGCCGACTCCGTGAAGGGCCGCTTTACCATCTCCCGGGATAACTCCAA |
| | | GAACACTCTGTACCTCCAAATGAACTCGCTGAGAGCCGAGGACACCGCCGTGTATTAC |
| | | TGCGCGAAGGCGCTGGTCGGCGCGACTGGGGCATTCGACATCTGGGGACAGGGAACTC |
| | | TTGTGACCGTGTCGAGCGGAGGCGGCGGCTCCGGCGGAGGAGGGAGCGGGGGCGGTGG |
| | | TTCCGAAATCGTGTTGACTCAGTCCCCGGGAACCCTGAGCTTGTCACCCGGGGAGCGG |
| | | GCCACTCTCTCCTGTCGCGCCTCCCAATCGCTCTCATCCAATTTCCTGGCCTGGTACC |
| | | AGCAGAAGCCCGGACAGGCCCCGGGCCTGCTCATCTACGGCGCTTCAAACTGGGCAAC |
| | | GGGAACCCCTGATCGGTTCAGCGGAAGCGGATCGGGTACTGACTTTACCCTGACCATC |
| | | ACCAGACTGGAACCGGAGGACTTCGCCGTGTACTACTGCCAGTACTACGGCACCTCCC |
| | | CCATGTACACATTCGGACAGGGTACCAAGGTCGAGATTAAGACCACTACCCCAGCACC |
| | | GAGGCCACCCACCCCGGCTCCTACCATCGCCTCCCAGCCTCTGTCCCTGCGTCCGGAG |
| | | GCATGTAGACCCGCAGCTGGTGGGGCCGTGCATACCCGGGGTCTTGACTTCGCCTGCG |
| | | ATATCTACATTTGGGCCCCTCTGGCTGGTACTTGCGGGGTCCTGCTGCTTTCACTCGT |
| | | GATCACTCTTTACTGTAAGCGCGGTCGGAAGAAGCTGCTGTACATCTTTAAGCAACCC |
| | | TTCATGAGGCCTGTGCAGACTACTCAAGAGGAGGACGGCTGTTCATGCCGGTTCCCAG |
| | | AGGAGGAGGAAGGCGGCTGCGAACTGCGCGTGAAATTCAGCCGCAGCGCAGATGCTCC |
| | | AGCCTACAAGCAGGGGCAGAACCAGCTCTACAACGAACTCAATCTTGGTCGGAGAGAG |
| | | GAGTACGACGTGCTGGACAAGCGGAGAGGACGGGACCCAGAAATGGGCGGGAAGCCGC |
| | | GCAGAAAGAATCCCCAAGAGGGCCTGTACAACGAGCTCCAAAAGGATAAGATGGCAGA |
| | | AGCCTATAGCGAGATTGGTATGAAAGGGGAACGCAGAAGAGGCAAAGGCCACGACGGA |
| | | CTGTACCAGGGACTCAGCACCGCCACCAAGGACACCTATGACGCTCTTCACATGCAGG |
| | | CCCTGCCGCCTCGG |
| BCMA_EBB- | | |
| C1980-A2 | | |
| BCMA_EBB- | 147 | EVQLLESGGGLVQPGGSLRLSCAASGFTFSSYAMSWVRQAPGKGLEWVSAISGSGGST |
| C1980-A2-aa | | YYADSVKGRFTISRDNSKNTLYLQMNSLRAEDTAVYYCVLWFGEGFDPWGQGTLVTVS |
| ScFv domain | | SGGGGSGGGGSGGGGSDIVLTQSPLSLPVTPGEPASISCRSSQSLLHSNGYNYLDWYL |
| | | QKPGQSPQLLIYLGSNRASGVPDRFSGSGSGTDFTLKISRVEAEDVGVYYCMQALQTP |
| | | LTFGGGTKVDIK |
| BCMA_EBB- | 168 | GAAGTGCAGCTGCTTGAGAGCGGTGGAGGTCTGGTGCAGCCCGGGGGATCACTGCGCC |
| C1980-A2-nt | | TGTCCTGTGCCGCGTCCGGTTTCACTTTCTCCTCGTACGCCATGTCGTGGGTCAGACA |
| ScFv domain | | GGCACCGGGAAAGGGACTGGAATGGGTGTCAGCCATTTCGGGTTCGGGGGGCAGCACC |
| | | TACTACGCTGACTCCGTGAAGGGCCGGTTCACCATTTCCCGCGACAACTCCAAGAACA |
| | | CCTTGTACCTCCAAATGAACTCCCTGCGGGCCGAAGATACCGCCGTGTATTACTGCGT |
| | | GCTGTGGTTCGGAGAGGGATTCGACCCGTGGGGACAAGGAACACTCGTGACTGTGTCA |
| | | TCCGGCGGAGGCGGCAGCGGTGGCGGCGGTTCCGGCGGCGGCGGATCTGACATCGTGT |
| | | TGACCCAGTCCCCTCTGAGCCTGCCGGTCACTCCTGGCGAACCAGCCAGCATCTCCTG |
| | | CCGGTCGAGCCAGTCCCTCCTGCACTCCAATGGGTACAACTACCTCGATTGGTATCTG |
| | | CAAAAGCCGGGCCAGAGCCCCCAGCTGCTGATCTACCTTGGGTCAAACCGCGCTTCCG |
| | | GGGTGCCTGATAGATTCTCCGGGTCCGGGAGCGGAACCGACTTTACCCTGAAAATCTC |
| | | GAGGGTGGAGGCCGAGGACGTCGGAGTGTACTACTGCATGCAGGCGCTCCAGACTCCC |
| | | CTGACCTTCGGAGGAGGAACGAAGGTCGACATCAAGA |
| BCMA_EBB- | 189 | EVQLLESGGGLVQPGGSLRLSCAASGFTFSSYAMSWVRQAPGKGLEWVSAISGSGGST |
| C1980-A2-aa | | YYADSVKGRFTISRDNSKNTLYLQMNSLRAEDTAVYYCVLWFGEGFDPWGQGTLVTVS |
| VH | | S |
| BCMA_EBB- | 210 | DIVLTQSPLSLPVTPGEPASISCRSSQSLLHSNGYNYLDWYLQKPGQSPQLLIYLGSN |
| C1980-A2-aa | | RASGVPDRFSGSGSGTDFTLKISRVEAEDVGVYYCMQALQTPLTFGGGTKVDIK |
| VL | | |
| BCMA_EBB- | 231 | MALPVTALLLPLALLLHAARPEVQLLESGGGLVQPGGSLRLSCAASGFTFSSYAMSWV |
| C1980-A2-aa | | RQAPGKGLEWVSAISGSGGSTYYADSVKGRFTISRDNSKNTLYLQMNSLRAEDTAVYY |
| Full CART | | CVLWFGEGFDPWGQGTLVTVSSGGGGSGGGGSGGGGSDIVLTQSPLSLPVTPGEPASI |
| | | SCRSSQSLLHSNGYNYLDWYLQKPGQSPQLLIYLGSNRASGVPDRFSGSGSGTDFTLK |
| | | ISRVEAEDVGVYYCMQALQTPLTFGGGTKVDIKTTTPAPRPPTPAPTIASQPLSLRPE |
| | | ACRPAAGGAVHTRGLDFACDIYIWAPLAGTCGVLLLSLVITLYCKRGRKKLLYIFKQP |
| | | FMRPVQTTQEEDGCSCRFPEEEEGGCELRVKFSRSADAPAYKQGQNQLYNELNLGRRE |
| | | EYDVLDKRRGRDPEMGGKPRRKNPQEGLYNELQKDKMAEAYSEIGMKGERRRGKGHDG |
| | | LYQGLSTATKDTYDALHMQALPPR |
| BCMA_EBB- | 252 | ATGGCCCTCCCTGTCACCGCCCTGCTGCTTCCGCTGGCTCTTCTGCTCCACGCCGCTC |
| C1980-A2-nt | | GGCCCGAAGTGCAGCTGCTTGAGAGCGGTGGAGGTCTGGTGCAGCCCGGGGGATCACT |
| Full CART | | GCGCCTGTCCTGTGCCGCGTCCGGTTTCACTTTCTCCTCGTACGCCATGTCGTGGGTC |
| | | AGACAGGCACCGGGAAAGGGACTGGAATGGGTGTCAGCCATTTCGGGTTCGGGGGGCA |
| | | GCACCTACTACGCTGACTCCGTGAAGGGCCGGTTCACCATTTCCCGCGACAACTCCAA |
| | | GAACACCTTGTACCTCCAAATGAACTCCCTGCGGGCCGAAGATACCGCCGTGTATTAC |
| | | TGCGTGCTGTGGTTCGGAGAGGGATTCGACCCGTGGGGACAAGGAACACTCGTGACTG |
| | | TGTCATCCGGCGGAGGCGGCAGCGGTGGCGGCGGTTCCGGCGGCGGCGGATCTGACAT |
| | | CGTGTTGACCCAGTCCCCTCTGAGCCTGCCGGTCACTCCTGGCGAACCAGCCAGCATC |
| | | TCCTGCCGGTCGAGCCAGTCCCTCCTGCACTCCAATGGGTACAACTACCTCGATTGGT |
| | | ATCTGCAAAAGCCGGGCCAGAGCCCCCAGCTGCTGATCTACCTTGGGTCAAACCGCGC |
| | | TTCCGGGGTGCCTGATAGATTCTCCGGGTCCGGGAGCGGAACCGACTTTACCCTGAAA |
| | | ATCTCGAGGGTGGAGGCCGAGGACGTCGGAGTGTACTACTGCATGCAGGCGCTCCAGA |
| | | CTCCCCTGACCTTCGGAGGAGGAACGAAGGTCGACATCAAGACCACTACCCCAGCACC |
| | | GAGGCCACCCACCCCGGCTCCTACCATCGCCTCCCAGCCTCTGTCCCTGCGTCCGGAG |
| | | GCATGTAGACCCGCAGCTGGTGGGGCCGTGCATACCCGGGGTCTTGACTTCGCCTGCG |
| | | ATATCTACATTTGGGCCCCTCTGGCTGGTACTTGCGGGGTCCTGCTGCTTTCACTCGT |
| | | GATCACTCTTTACTGTAAGCGCGGTCGGAAGAAGCTGCTGTACATCTTTAAGCAACCC |
| | | TTCATGAGGCCTGTGCAGACTACTCAAGAGGAGGACGGCTGTTCATGCCGGTTCCCAG |
| | | AGGAGGAGGAAGGCGGCTGCGAACTGCGCGTGAAATTCAGCCGCAGCGCAGATGCTCC |
| | | AGCCTACAAGCAGGGGCAGAACCAGCTCTACAACGAACTCAATCTTGGTCGGAGAGAG |
| | | GAGTACGACGTGCTGGACAAGCGGAGAGGACGGGACCCAGAAATGGGCGGGAAGCCGC |
| | | GCAGAAAGAATCCCCAAGAGGGCCTGTACAACGAGCTCCAAAAGGATAAGATGGCAGA |
| | | AGCCTATAGCGAGATTGGTATGAAAGGGGAACGCAGAAGAGGCAAAGGCCACGACGGA |
| | | CTGTACCAGGGACTCAGCACCGCCACCAAGGACACCTATGACGCTCTTCACATGCAGG |
| | | CCCTGCCGCCTCGG |
| BCMA_EBB- | | |
| C1981-C3 | | |
| BCMA_EBB- | 148 | QVQLVESGGGLVQPGGSLRLSCAASGFTFSSYAMSWVRQAPGKGLEWVSAISGSGGST |
| C1981-C3-aa | | YYADSVKGRFTISRDNSKNTLYLQMNSLRAEDTAVYYCAKVGYDSSGYYRDYYGMDVW |
| ScFv domain | | GQGTTVTVSSGGGGSGGGGSGGGGSEIVLTQSPGTLSLSPGERATLSCRASQSVSSSY |
| | | LAWYQQKPGQAPRLLIYGTSSRATGISDRFSGSGSGTDFTLTISRLEPEDFAVYYCQH |
| | | YGNSPPKFTFGPGTKLEIK |
| BCMA_EBB- | 169 | CAAGTGCAGCTCGTGGAGTCAGGCGGAGGACTGGTGCAGCCCGGGGGCTCCCTGAGAC |
| C1981-C3-nt | | TTTCCTGCGCGGCATCGGGTTTTACCTTCTCCTCCTATGCTATGTCCTGGGTGCGCCA |
| ScFv domain | | GGCCCCGGGAAAGGGACTGGAATGGGTGTCCGCAATCAGCGGTAGCGGGGGCTCAACA |
| | | TACTACGCCGACTCCGTCAAGGGTCGCTTCACTATTTCCCGGGACAACTCCAAGAATA |
| | | CCCTGTACCTCCAAATGAACAGCCTCAGGGCCGAGGATACTGCCGTGTACTACTGCGC |
| | | CAAAGTCGGATACGATAGCTCCGGTTACTACCGGGACTACTACGGAATGGACGTGTGG |
| | | GGACAGGGCACCACCGTGACCGTGTCAAGCGGCGGAGGCGGTTCAGGAGGGGGAGGCT |
| | | CCGGCGGTGGAGGGTCCGAAATCGTCCTGACTCAGTCGCCTGGCACTCTGTCGTTGTC |
| | | CCCGGGGGAGCGCGCTACCCTGTCGTGTCGGGCGTCGCAGTCCGTGTCGAGCTCCTAC |
| | | CTCGCGTGGTACCAGCAGAAGCCCGGACAGGCCCCTAGACTTCTGATCTACGGCACTT |
| | | CTTCACGCGCCACCGGGATCAGCGACAGGTTCAGCGGCTCCGGCTCCGGGACCGACTT |
| | | CACCCTGACCATTAGCCGGCTGGAGCCTGAAGATTTCGCCGTGTATTACTGCCAACAC |
| | | TACGGAAACTCGCCGCCAAAGTTCACGTTCGGACCCGGAACCAAGCTGGAAATCAAG |
| BCMA_EBB- | 190 | QVQLVESGGGLVQPGGSLRLSCAASGFTFSSYAMSWVRQAPGKGLEWVSAISGSGGST |
| C1981-C3-aa | | YYADSVKGRFTISRDNSKNTLYLQMNSLRAEDTAVYYCAKVGYDSSGYYRDYYGMDVW |
| VH | | GQGTTVTVSS |
| BCMA_EBB- | 211 | EIVLTQSPGTLSLSPGERATLSCRASQSVSSSYLAWYQQKPGQAPRLLIYGTSSRATG |
| C1981-C3-aa | | ISDRFSGSGSGTDFTLTISRLEPEDFAVYYCQHYGNSPPKFTFGPGTKLEIK |
| VL | | |
| BCMA_EBB- | 232 | MALPVTALLLPLALLLHAARPQVQLVESGGGLVQPGGSLRLSCAASGFTFSSYAMSWV |
| C1981-C3-aa | | RQAPGKGLEWVSAISGSGGSTYYADSVKGRFTISRDNSKNTLYLQMNSLRAEDTAVYY |
| Full CART | | CAKVGYDSSGYYRDYYGMDVWGQGTTVTVSSGGGGSGGGGSGGGGSEIVLTQSPGTLS |
| | | LSPGERATLSCRASQSVSSSYLAWYQQKPGQAPRLLIYGTSSRATGISDRFSGSGSGT |
| | | DFTLTISRLEPEDFAVYYCQHYGNSPPKFTFGPGTKLEIKTTTPAPRPPTPAPTIASQ |
| | | PLSLRPEACRPAAGGAVHTRGLDFACDIYIWAPLAGTCGVLLLSLVITLYCKRGRKKL |
| | | LYIFKQPFMRPVQTTQEEDGCSCRFPEEEEGGCELRVKFSRSADAPAYKQGQNQLYNE |
| | | LNLGRREEYDVLDKRRGRDPEMGGKPRRKNPQEGLYNELQKDKMAEAYSEIGMKGERR |
| | | RGKGHDGLYQGLSTATKDTYDALHMQALPPR |
| BCMA_EBB- | 253 | ATGGCCCTCCCTGTCACCGCCCTGCTGCTTCCGCTGGCTCTTCTGCTCCACGCCGCTC |
| C1981-C3-nt | | GGCCCCAAGTGCAGCTCGTGGAGTCAGGCGGAGGACTGGTGCAGCCCGGGGGCTCCCT |
| Full CART | | GAGACTTTCCTGCGCGGCATCGGGTTTTACCTTCTCCTCCTATGCTATGTCCTGGGTG |
| | | CGCCAGGCCCCGGGAAAGGGACTGGAATGGGTGTCCGCAATCAGCGGTAGCGGGGGCT |
| | | CAACATACTACGCCGACTCCGTCAAGGGTCGCTTCACTATTTCCCGGGACAACTCCAA |
| | | GAATACCCTGTACCTCCAAATGAACAGCCTCAGGGCCGAGGATACTGCCGTGTACTAC |
| | | TGCGCCAAAGTCGGATACGATAGCTCCGGTTACTACCGGGACTACTACGGAATGGACG |
| | | TGTGGGGACAGGGCACCACCGTGACCGTGTCAAGCGGCGGAGGCGGTTCAGGAGGGGG |
| | | AGGCTCCGGCGGTGGAGGGTCCGAAATCGTCCTGACTCAGTCGCCTGGCACTCTGTCG |
| | | TTGTCCCCGGGGGAGCGCGCTACCCTGTCGTGTCGGGCGTCGCAGTCCGTGTCGAGCT |
| | | CCTACCTCGCGTGGTACCAGCAGAAGCCCGGACAGGCCCCTAGACTTCTGATCTACGG |
| | | CACTTCTTCACGCGCCACCGGGATCAGCGACAGGTTCAGCGGCTCCGGCTCCGGGACC |
| | | GACTTCACCCTGACCATTAGCCGGCTGGAGCCTGAAGATTTCGCCGTGTATTACTGCC |
| | | AACACTACGGAAACTCGCCGCCAAAGTTCACGTTCGGACCCGGAACCAAGCTGGAAAT |
| | | CAAGACCACTACCCCAGCACCGAGGCCACCCACCCCGGCTCCTACCATCGCCTCCCAG |
| | | CCTCTGTCCCTGCGTCCGGAGGCATGTAGACCCGCAGCTGGTGGGGCCGTGCATACCC |
| | | GGGGTCTTGACTTCGCCTGCGATATCTACATTTGGGCCCCTCTGGCTGGTACTTGCGG |
| | | GGTCCTGCTGCTTTCACTCGTGATCACTCTTTACTGTAAGCGCGGTCGGAAGAAGCTG |
| | | CTGTACATCTTTAAGCAACCCTTCATGAGGCCTGTGCAGACTACTCAAGAGGAGGACG |
| | | GCTGTTCATGCCGGTTCCCAGAGGAGGAGGAAGGCGGCTGCGAACTGCGCGTGAAATT |
| | | CAGCCGCAGCGCAGATGCTCCAGCCTACAAGCAGGGGCAGAACCAGCTCTACAACGAA |
| | | CTCAATCTTGGTCGGAGAGAGGAGTACGACGTGCTGGACAAGCGGAGAGGACGGGACC |
| | | CAGAAATGGGCGGGAAGCCGCGCAGAAAGAATCCCCAAGAGGGCCTGTACAACGAGCT |
| | | CCAAAAGGATAAGATGGCAGAAGCCTATAGCGAGATTGGTATGAAAGGGGAACGCAGA |
| | | AGAGGCAAAGGCCACGACGGACTGTACCAGGGACTCAGCACCGCCACCAAGGACACCT |
| | | ATGACGCTCTTCACATGCAGGCCCTGCCGCCTCGG |
| BCMA_EBB- | | |
| C1978-G4 | | |
| BCMA_EBB- | 149 | EVQLVESGGGLVQPGGSLRLSCAASGFTFSSYAMSWVRQAPGKGLEWVSAISGSGGST |
| C1978-G4-aa | | YYADSVKGRFTISRDNSKNTLYLQMNSLRAEDTAVYYCAKMGWSSGYLGAFDIWGQGT |
| ScFv domain | | TVTVSSGGGGSGGGGSGGGGSEIVLTQSPGTLSLSPGERATLSCRASQSVASSFLAWY |
| | | QQKPGQAPRLLIYGASGRATGIPDRFSGSGSGTDFTLTISRLEPEDFAVYYCQHYGGS |
| | | PRLTFGGGTKVDIK |
| BCMA_EBB- | 170 | GAAGTCCAACTGGTGGAGTCCGGGGGAGGGCTCGTGCAGCCCGGAGGCAGCCTTCGGC |
| C1978-G4-nt | | TGTCGTGCGCCGCCTCCGGGTTCACGTTCTCATCCTACGCGATGTCGTGGGTCAGACA |
| ScFv domain | | GGCACCAGGAAAGGGACTGGAATGGGTGTCCGCCATTAGCGGCTCCGGCGGTAGCACC |
| | | TACTATGCCGACTCAGTGAAGGGAAGGTTCACTATCTCCCGCGACAACAGCAAGAACA |
| | | CCCTGTACCTCCAAATGAACTCTCTGCGGGCCGAGGATACCGCGGTGTACTATTGCGC |
| | | CAAGATGGGTTGGTCCAGCGGATACTTGGGAGCCTTCGACATTTGGGGACAGGGCACT |
| | | ACTGTGACCGTGTCCTCCGGGGGTGGCGGATCGGGAGGCGGCGGCTCGGGTGGAGGGG |
| | | GTTCCGAAATCGTGTTGACCCAGTCACCGGGAACCCTCTCGCTGTCCCCGGGAGAACG |
| | | GGCTACACTGTCATGTAGAGCGTCCCAGTCCGTGGCTTCCTCGTTCCTGGCCTGGTAC |
| | | CAGCAGAAGCCGGGACAGGCACCCCGCCTGCTCATCTACGGAGCCAGCGGCCGGGCGA |
| | | CCGGCATCCCTGACCGCTTCTCCGGTTCCGGCTCGGGCACCGACTTTACTCTGACCAT |
| | | TAGCAGGCTTGAGCCCGAGGATTTTGCCGTGTACTACTGCCAACACTACGGGGGGAGC |
| | | CCTCGCCTGACCTTCGGAGGCGGAACTAAGGTCGATATCAAAA |
| BCMA_EBB- | 191 | EVQLVESGGGLVQPGGSLRLSCAASGFTFSSYAMSWVRQAPGKGLEWVSAISGSGGST |
| C1978-G4-aa | | YYADSVKGRFTISRDNSKNTLYLQMNSLRAEDTAVYYCAKMGWSSGYLGAFDIWGQGT |
| VH | | TVTVSS |
| BCMA_EBB- | 212 | EIVLTQSPGTLSLSPGERATLSCRASQSVASSFLAWYQQKPGQAPRLLIYGASGRATG |
| C1978-G4-aa | | IPDRFSGSGSGTDFTLTISRLEPEDFAVYYCQHYGGSPRLTFGGGTKVDIK |
| VL | | |
| BCMA_EBB- | 233 | MALPVTALLLPLALLLHAARPEVQLVESGGGLVQPGGSLRLSCAASGFTFSSYAMSWV |
| C1978-G4-aa | | RQAPGKGLEWVSAISGSGGSTYYADSVKGRFTISRDNSKNTLYLQMNSLRAEDTAVYY |
| Full CART | | CAKMGWSSGYLGAFDIWGQGTTVTVSSGGGGSGGGGSGGGGSEIVLTQSPGTLSLSPG |
| | | ERATLSCRASQSVASSFLAWYQQKPGQAPRLLIYGASGRATGIPDRFSGSGSGTDFTL |
| | | TISRLEPEDFAVYYCQHYGGSPRLTFGGGTKVDIKTTTPAPRPPTPAPTIASQPLSLR |
| | | PEACRPAAGGAVHTRGLDFACDIYIWAPLAGTCGVLLLSLVITLYCKRGRKKLLYIFK |
| | | QPFMRPVQTTQEEDGCSCRFPEEEEGGCELRVKFSRSADAPAYKQGQNQLYNELNLGR |
| | | REEYDVLDKRRGRDPEMGGKPRRKNPQEGLYNELQKDKMAEAYSEIGMKGERRRGKGH |
| | | DGLYQGLSTATKDTYDALHMQALPPR |
| BCMA_EBB- | 254 | ATGGCCCTCCCTGTCACCGCCCTGCTGCTTCCGCTGGCTCTTCTGCTCCACGCCGCTC |
| C1978-G4-nt | | GGCCCGAAGTCCAACTGGTGGAGTCCGGGGGAGGGCTCGTGCAGCCCGGAGGCAGCCT |
| Full CART | | TCGGCTGTCGTGCGCCGCCTCCGGGTTCACGTTCTCATCCTACGCGATGTCGTGGGTC |
| | | AGACAGGCACCAGGAAAGGGACTGGAATGGGTGTCCGCCATTAGCGGCTCCGGCGGTA |
| | | GCACCTACTATGCCGACTCAGTGAAGGGAAGGTTCACTATCTCCCGCGACAACAGCAA |
| | | GAACACCCTGTACCTCCAAATGAACTCTCTGCGGGCCGAGGATACCGCGGTGTACTAT |
| | | TGCGCCAAGATGGGTTGGTCCAGCGGATACTTGGGAGCCTTCGACATTTGGGGACAGG |
| | | GCACTACTGTGACCGTGTCCTCCGGGGGTGGCGGATCGGGAGGCGGCGGCTCGGGTGG |
| | | AGGGGGTTCCGAAATCGTGTTGACCCAGTCACCGGGAACCCTCTCGCTGTCCCCGGGA |
| | | GAACGGGCTACACTGTCATGTAGAGCGTCCCAGTCCGTGGCTTCCTCGTTCCTGGCCT |
| | | GGTACCAGCAGAAGCCGGGACAGGCACCCCGCCTGCTCATCTACGGAGCCAGCGGCCG |
| | | GGCGACCGGCATCCCTGACCGCTTCTCCGGTTCCGGCTCGGGCACCGACTTTACTCTG |
| | | ACCATTAGCAGGCTTGAGCCCGAGGATTTTGCCGTGTACTACTGCCAACACTACGGGG |
| | | GGAGCCCTCGCCTGACCTTCGGAGGCGGAACTAAGGTCGATATCAAAACCACTACCCC |
| | | AGCACCGAGGCCACCCACCCCGGCTCCTACCATCGCCTCCCAGCCTCTGTCCCTGCGT |
| | | CCGGAGGCATGTAGACCCGCAGCTGGTGGGGCCGTGCATACCCGGGGTCTTGACTTCG |
| | | CCTGCGATATCTACATTTGGGCCCCTCTGGCTGGTACTTGCGGGGTCCTGCTGCTTTC |
| | | ACTCGTGATCACTCTTTACTGTAAGCGCGGTCGGAAGAAGCTGCTGTACATCTTTAAG |
| | | CAACCCTTCATGAGGCCTGTGCAGACTACTCAAGAGGAGGACGGCTGTTCATGCCGGT |
| | | TCCCAGAGGAGGAGGAAGGCGGCTGCGAACTGCGCGTGAAATTCAGCCGCAGCGCAGA |
| | | TGCTCCAGCCTACAAGCAGGGGCAGAACCAGCTCTACAACGAACTCAATCTTGGTCGG |
| | | AGAGAGGAGTACGACGTGCTGGACAAGCGGAGAGGACGGGACCCAGAAATGGGCGGGA |
| | | AGCCGCGCAGAAAGAATCCCCAAGAGGGCCTGTACAACGAGCTCCAAAAGGATAAGAT |
| | | GGCAGAAGCCTATAGCGAGATTGGTATGAAAGGGGAACGCAGAAGAGGCAAAGGCCAC |
| | | GACGGACTGTACCAGGGACTCAGCACCGCCACCAAGGACACCTATGACGCTCTTCACA |
| | | TGCAGGCCCTGCCGCCTCGG |

TABLE 15
Heavy Chain Variable Domain CDRs according to the Kabat numbering scheme
(Kabat et al. (1991), “Sequences of Proteins of Immunological Interest,”
5th Ed. Public Health Service, National Institutes of Health, Bethesda, MD)

| | | SEQ | | SEQ | | SEQ |
|---|---|---|---|---|---|---|
| Candidate | HCDR1 | ID NO | HCDR2 | ID NO | HCDR3 | ID NO |
| 139109 | NHGMS | 1118 | GIVYSGSTYYAASVKG | 1158 | HGGESDV | 1198 |
| 139103 | NYAMS | 1119 | GISRSGENTYYADSVKG | 1159 | SPAHYYGGMDV | 1199 |
| 139105 | DYAMH | 1120 | GISWNSGSIGYADSVKG | 1160 | HSFLAY | 1200 |
| 139111 | NHGMS | 1121 | GIVYSGSTYYAASVKG | 1161 | HGGESDV | 1201 |
| 139100 | NFGIN | 1122 | WINPKNNNTNYAQKFQG | 1162 | GPYYYQSYMDV | 1202 |
| 139101 | SDAMT | 1123 | VISGSGGTTYYADSVKG | 1163 | LDSSGYYYARGPRY | 1203 |
| 139102 | NYGIT | 1124 | WISAYNGNTNYAQKFQG | 1164 | GPYYYYMDV | 1204 |
| 139104 | NHGMS | 1125 | GIVYSGSTYYAASVKG | 1165 | HGGESDV | 1205 |
| 139106 | NHGMS | 1126 | GIVYSGSTYYAASVKG | 1166 | HGGESDV | 1206 |
| 139107 | NHGMS | 1127 | GIVYSGSTYYAASVKG | 1167 | HGGESDV | 1207 |
| 139108 | DYYMS | 1128 | YISSSGSTIYYADSVKG | 1168 | ESGDGMDV | 1208 |
| 139110 | DYYMS | 1129 | YISSSGNTIYYADSVKG | 1169 | STMVREDY | 1209 |
| 139112 | NHGMS | 1130 | GIVYSGSTYYAASVKG | 1170 | HGGESDV | 1210 |
| 139113 | NHGMS | 1131 | GIVYSGSTYYAASVKG | 1171 | HGGESDV | 1211 |
| 139114 | NHGMS | 1132 | GIVYSGSTYYAASVKG | 1172 | HGGESDV | 1212 |
| 149362 | SSYYYWG | 1133 | SIYYSGSAYYNPSLKS | 1173 | HWQEWPDAFDI | 1213 |
| 149363 | TSGMCVS | 1134 | RIDWDEDKFYSTSLKT | 1174 | SGAGGTSATAFDI | 1214 |
| 149364 | SYSMN | 1135 | SISSSSSYIYYADSVKG | 1175 | TIAAVYAFDI | 1215 |
| 149365 | DYYMS | 1136 | YISSSGSTIYYADSVKG | 1176 | DLRGAFDI | 1216 |
| 149366 | SHYIH | 1137 | MINPSGGVTAYSQTLQG | 1177 | EGSGSGWYFDF | 1217 |
| 149367 | SGGYYWS | 1138 | YIYYSGSTYYNPSLKS | 1178 | AGIAARLRGAFDI | 1218 |
| 149368 | SYAIS | 1139 | GIIPIFGTANYAQKFQG | 1179 | RGGYQLLRWDVGLLRSAFDI | 1219 |
| 149369 | SNSAAWN | 1140 | RTYYRSKWYSFYAISLKS | 1180 | SSPEGLFLYWFDP | 1220 |
| BCMA_EB | SYAMS | 1141 | AISGSGGSTYYADSVKG | 1181 | VEGSGSLDY | 1221 |
| B-C1978-A4 | | | | | | |
| BCMA_EB | RYPMS | 1142 | GISDSGVSTYYADSAKG | 1182 | RAGSEASDI | 1222 |
| B-C1978-G1 | | | | | | |
| BCMA_EB | SYAMS | 1143 | AISGSGGSTYYADSVKG | 1183 | ATYKRELRYYYGMDV | 1223 |
| B-C1979-C1 | | | | | | |
| BCMA_EB | SYAMS | 1144 | AISGSGGSTYYADSVKG | 1184 | ATYKRELRYYYGMDV | 1224 |
| B-C1978-C7 | | | | | | |
| BCMA_EB | DYAMH | 1145 | GISWNSGSIGYADSVKG | 1185 | VGKAVPDV | 1225 |
| B-C1978-D10 | | | | | | |
| BCMA_EB | DYAMH | 1146 | SINWKGNSLAYGDSVKG | 1186 | HQGVAYYNYAMDV | 1226 |
| B-C1979-C12 | | | | | | |
| BCMA_EB | SYAMS | 1147 | AISGSGGSTYYADSVKG | 1187 | VVRDGMDV | 1227 |
| B-C1980-G4 | | | | | | |
| BCMA_EB | SYAMS | 1148 | AISGSGGSTYYADSVKG | 1188 | IPQTGTFDY | 1228 |
| B-C1980-D2 | | | | | | |
| BCMA_EB | SYAMS | 1149 | AISGSGGSTYYADSVKG | 1189 | ANYKRELRYYYGMDV | 1229 |
| B-C1978-A10 | | | | | | |
| BCMA_EB | SYAMS | 1150 | AISGSGGSTYYADSVKG | 1190 | ALVGATGAFDI | 1230 |
| B-C1978-D4 | | | | | | |
| BCMA_EB | SYAMS | 1151 | AISGSGGSTYYADSVKG | 1191 | WFGEGFDP | 1231 |
| B-C1980-A2 | | | | | | |
| BCMA_EB | SYAMS | 1152 | AISGSGGSTYYADSVKG | 1192 | VGYDSSGYYRDYYGMDV | 1232 |
| B-C1981-C3 | | | | | | |
| BCMA_EB | SYAMS | 1153 | AISGSGGSTYYADSVKG | 1193 | MGWSSGYLGAFDI | 1233 |
| B-C1978-G4 | | | | | | |
| A7D12.2 | NFGMN | 1154 | WINTYTGESYFADDFKG | 1194 | GEIYYGYDGGFAY | 1234 |
| C11D5.3 | DYSIN | 1155 | WINTETREPAYAYDFRG | 1195 | DYSYAMDY | 1235 |
| C12A3.2 | HYSMN | 1156 | RINTESGVPIYADDFKG | 1196 | DYLYSLDF | 1236 |
| C13F12.1 | HYSMN | 1157 | RINTETGEPLYADDFKG | 1197 | DYLYSCDY | 1237 |

TABLE 16
Light Chain Variable Domain CDRs according to the Kabat numbering scheme
(Kabat et al. (1991), “Sequences of Proteins of Immunological Interest,”
5th Ed. Public Health Service, National Institutes of Health, Bethesda, MD)

| | | SEQ | | SEQ | | SEQ ID |
|---|---|---|---|---|---|---|
| Candidate | LCDR1 | ID NO | LCDR2 | ID NO | LCDR3 | NO |
| 139109 | RASQSISSYLN | 1238 | AASSLQS | 1278 | QQSYSTPYT | 1318 |
| 139103 | RASQSISSSFLA | 1239 | GASRRAT | 1279 | QQYHSSPSWT | 1319 |
| 139105 | RSSQSLLHSNGYNYLD | 1240 | LGSNRAS | 1280 | MQALQTPYT | 1320 |
| 139111 | KSSQSLLRNDGKTPLY | 1241 | EVSNRFS | 1281 | MQNIQFPS | 1321 |
| 139100 | RSSQSLLHSNGYNYLN | 1242 | LGSKRAS | 1282 | MQALQTPYT | 1322 |
| 139101 | RASQSISSYLN | 1243 | GASTLAS | 1283 | QQSYKRAS | 1323 |
| 139102 | RSSQSLLYSNGYNYVD | 1244 | LGSNRAS | 1284 | MQGRQFPYS | 1324 |
| 139104 | RASQSVSSNLA | 1245 | GASTRAS | 1285 | QQYGSSLT | 1325 |
| 139106 | RASQSVSSKLA | 1246 | GASIRAT | 1286 | QQYGSSSWT | 1326 |
| 139107 | RASQSVGSTNLA | 1247 | DASNRAT | 1287 | QQYGSSPPWT | 1327 |
| 139108 | RASQSISSYLN | 1248 | AASSLQS | 1288 | QQSYTLA | 1328 |
| 139110 | KSSESLVHNSGKTYLN | 1249 | EVSNRDS | 1289 | MQGTHWPGT | 1329 |
| 139112 | QASEDINKFLN | 1250 | DASTLQT | 1290 | QQYESLPLT | 1330 |
| 139113 | RASQSVGSNLA | 1251 | GASTRAT | 1291 | QQYNDWLPVT | 1331 |
| 139114 | RASQSIGSSSLA | 1252 | GASSRAS | 1292 | QQYAGSPPFT | 1332 |
| 149362 | KASQDIDDAMN | 1253 | SATSPVP | 1293 | LQHDNFPLT | 1333 |
| 149363 | RASQDIYNNLA | 1254 | AANKSQS | 1294 | QHYYRFPYS | 1334 |
| 149364 | RSSQSLLHSNGYNYLD | 1255 | LGSNRAS | 1295 | MQALQTPYT | 1335 |
| 149365 | GGNNIGTKSVH | 1256 | DDSVRPS | 1296 | QVWDSDSEHVV | 1336 |
| 149366 | SGDGLSKKYVS | 1257 | RDKERPS | 1297 | QAWDDTTVv | 1337 |
| 149367 | RASQGIRNWLA | 1258 | AASNLQS | 1298 | QKYNSAPFT | 1338 |
| 149368 | GGNNIGSKSVH | 1259 | GKNNRPS | 1299 | SSRDSSGDHLRV | 1339 |
| 149369 | QGDSLGNYYAT | 1260 | GTNNRPS | 1300 | NSRDSSGHHLL | 1340 |
| BCMA_EBB- | RASQSVSSAYLA | 1261 | GASTRAT | 1301 | QHYGSSFNGSSLFT | 1341 |
| C1978-A4 | | | | | | |
| BCMA_EBB- | RASQSVSNSLA | 1262 | DASSRAT | 1302 | QQFGTSSGLT | 1342 |
| C1978-G1 | | | | | | |
| BCMA_EBB- | RASQSVSSSFLA | 1263 | GASSRAT | 1303 | QQYHSSPSWT | 1343 |
| C1979-C1 | | | | | | |
| BCMA_EBB- | RASQSVSTTFLA | 1264 | GSSNRAT | 1304 | QQYHSSPSWT | 1344 |
| C1978-C7 | | | | | | |
| BCMA_EBB- | RASQSISSYLN | 1265 | AASSLQS | 1305 | QQSYSTPYS | 1345 |
| C1978-D10 | | | | | | |
| BCMA_EBB- | RATQSIGSSFLA | 1266 | GASQRAT | 1306 | QHYESSPSWT | 1346 |
| C1979-C12 | | | | | | |
| BCMA_EBB- | RASQSVSSSYLA | 1267 | GASSRAT | 1307 | QQYGSPPRFT | 1347 |
| C1980-G4 | | | | | | |
| BCMA_EBB- | RASQSVSSSYLA | 1268 | GASSRAT | 1308 | QHYGSSPSWT | 1348 |
| C1980-D2 | | | | | | |
| BCMA_EBB- | RASQRVASNYLA | 1269 | GASSRAT | 1309 | QHYDSSPSWT | 1349 |
| C1978-A10 | | | | | | |
| BCMA_EBB- | RASQSLSSNFLA | 1270 | GASNWAT | 1310 | QYYGTSPMYT | 1350 |
| C1978-D4 | | | | | | |
| BCMA_EBB- | RSSQSLLHSNGYNYLD | 1271 | LGSNRAS | 1311 | MQALQTPLT | 1351 |
| C1980-A2 | | | | | | |
| BCMA_EBB- | RASQSVSSSYLA | 1272 | GTSSRAT | 1312 | QHYGNSPPKFT | 1352 |
| C1981-C3 | | | | | | |
| BCMA_EBB- | RASQSVASSFLA | 1273 | GASGRAT | 1313 | QHYGGSPRLT | 1353 |
| C1978-G4 | | | | | | |
| A7D12.2 | RASQDVNTAVS | 1274 | SASYRYT | 1314 | QQHYSTPWT | 1354 |
| C11D5.3 | RASESVSVIGAHLIH | 1275 | LASNLET | 1315 | LQSRIFPRT | 1355 |
| C12A3.2 | RASESVTILGSHLIY | 1276 | LASNVQT | 1316 | LQSRTIPRT | 1356 |
| C13F12.1 | RASESVTILGSHLIY | 1277 | LASNVQT | 1317 | LQSRTIPRT | 1357 |

### CD20 CAR and CD20-Binding Sequences

[0280] In some embodiments, the CAR IL-15R/IL-15-expressing cell described herein is a CD20 CAR-expressing cell (e.g., a cell expressing a CAR that binds to human CD20). In some embodiments, the CD20 CAR-expressing cell includes an antigen binding domain according to WO2016/164731 and PCT/US2017/055627, incorporated herein by reference. Exemplary CD20-binding sequences or CD20 CAR sequences are disclosed in, e.g., Tables 1-5 of PCT/US2017/055627. In some embodiments, the CD20-binding sequences or CD20 CAR comprises a CDR, variable region, scFv, or full-length sequence of a CD20 CAR disclosed in PCT/US2017/055627 or WO2016/164731.

### CD22 CAR and CD22-Binding Sequences

[0281] In some embodiments, the CAR IL-15R/IL-15-expressing cell described herein is a CD22 CAR-expressing cell (e.g., a cell expressing a CAR that binds to human CD22). In some embodiments, the CD22 CAR-expressing cell includes an antigen binding domain according to WO2016/164731 and PCT/US2017/055627, incorporated herein by reference. Exemplary CD22-binding sequences or CD22 CAR sequences are disclosed in, e.g., Tables 6A, 6B, 7A, 7B, 7C, 8A, 8B, 9A, 9B, 10A, and 10B of WO2016/164731 and Tables 6-10 of PCT/US2017/055627. In some embodiments, the CD22-binding sequences or CD22 CAR sequences comprise a CDR, variable region, scFv or full-length sequence of a CD22 CAR disclosed in PCT/US2017/055627 or WO2016/164731.

### EGFR CAR and EGFR-Binding Sequences

[0282] In some embodiments, the CAR IL-15R/IL-15-expressing cell described herein is an EGFR CAR-expressing cell (e.g., a cell expressing a CAR that binds to human EGFR). In some embodiments, the CAR-expressing cell described herein is an EGFRvIII CAR-expressing cell (e.g., a cell expressing a CAR that binds to human EGFRvIII). Exemplary EGFRvIII CARs can include sequences disclosed in WO2014/130657, e.g., Table 2 of WO2014/130657, incorporated herein by reference.

[0283] Exemplary EGFRvIII-binding sequences or EGFR CAR sequences may comprise a CDR, a variable region, an scFv, or a full-length CAR sequence of a sequence disclosed in Table 18 (or a sequence at least about 85%, 90%, 95%, 99% or more identical thereto, and/or having one, two, three or more substitutions, insertions, deletions, or modifications).

TABLE 18
Humanized EGFRvIII CAR Constructs

| | | |
|---|---|---|
| Name | SEQ ID NO: | Sequence |

CAR 1

| | | |
|---|---|---|
| CAR1 scFv | SEQ ID NO: | eiqlvqsgaevkkpgatvkisckgsgfniedyyihwvqqapgkglewmgridpendetkygpifqgrvtita |
| domain | 1358 | dtstntvymelsslrsedtavyycafrggvywgqgttvtvssggggsggggsggggsggggsdvvmtqspd |
| | | slayslgeratinckssqslldsdgktylnwlqqkpgqpplalislvskldsgvpdrfsgsgsgtdftltisslqaed |
| | | vavyycwqgthfpgtfgggtkveik |
| CAR1 | SEQ ID NO: | gaaatccagctggtccaatcgggagctgaggtcaagaagccgggagccaccgtcaagatctcatgcaaggggt |
| scFv domain | 1359 | cgggattcaacatcgaggactactacattcactgggtgcagcaagctccgggaaaaggcctggaatggatgggc |
| nt | | agaatcgacccagaaaacgacgaaactaagtacggaccgattttccaaggaagagtgactatcaccgccgatact |
| | | tcaaccaataccgtctacatggaactgagctcgctccggtccgaagatactgcagtgtattactgtgcctttcgcgga |
| | | ggggtgtactggggccaaggaactactgtcactgtctcgtcaggaggcggagggtcgggaggaggcgggagc |
| | | ggaggcggtggctcgggtggcggaggaagcgacgtggtgatgacccagtccccggactccctcgccgtgagc |
| | | ctcggagagagggcgactatcaattgcaagtcgtcccagtcacttctggattccgatggtaaaacgtacctcaactg |
| | | gctgcagcaaaagccagggcagccacccaaacggttgatctcccttgtgtccaaactggatagcggagtgcctga |
| | | ccgcttctcgggttccggtagcgggaccgacttcaccctgacgatcagctcactgcaggcggaggacgtggcag |
| | | tgtactactgctggcagggaacccacttccctggcacctttggaggtggcaccaaggtggagatcaag |
| CAR1 | SEQ ID NO: | atggccctccctgtcaccgccctgctgcttccgctggctcttctgctccacgccgctcggcccgaaatccagctggt |
| Soluble scFv - | 1360 | ccaatcgggagctgaggtcaagaagccgggagccaccgtcaagatctcatgcaaggggtcgggattcaacatc |
| nt | | gaggactactacattcactgggtgcagcaagctccgggaaaaggcctggaatggatgggcagaatcgacccag |
| | | aaaacgacgaaactaagtacggaccgattttccaaggaagagtgactatcaccgccgatacttcaaccaataccgt |
| | | ctacatggaactgagctcgctccggtccgaagatactgcagtgtattactgtgcctttcgcggaggggtgtactggg |
| | | gccaaggaactactgtcactgtctcgtcaggaggcggagggtcgggaggaggcgggagcggaggcggtggct |
| | | cgggtggcggaggaagcgacgtggtgatgacccagtccccggactccctcgccgtgagcctcggagagaggg |
| | | cgactatcaattgcaagtcgtcccagtcacttctggattccgatggtaaaacgtacctcaactggctgcagcaaaag |
| | | ccagggcagccacccaaacggttgatctcccttgtgtccaaactggatagcggagtgcctgaccgcttctcgggtt |
| | | ccggtagcgggaccgacttcaccctgacgatcagctcactgcaggcggaggacgtggcagtgtactactgctgg |
| | | cagggaacccacttccctggcacctttggaggtggcaccaaggtggagatcaagggatcgcaccaccatcacca |
| | | tcatcatcac |
| CAR1 | SEQ ID NO: | Malpvtalllplalllhaarpeiqlvqsgaevkkpgatvkisckgsgfniedyyihwvqqapgkglewmgrid |
| Soluble scFv - | 1361 | pendetkygpifqgrvtitadtstntvymelsslrsedtavyycafrggvywgqgttvtvssggggsggggsgg |
| aa | | ggsggggsdvvmtqspdslayslgeratinckssqslldsdgktylnwlqqkpgqppkrlislvskldsgvpdr |
| | | fsgsgsgtdftltisslqaedvavyycwqgthfpgtfgggtkveikgshhhhhhhh |
| CAR1 - Full - | SEQ ID NO: | atggccctccctgtcaccgccctgctgcttccgctggctcttctgctccacgccgctcggcccgagatccagctggt |
| nt | 1362 | gcagtcgggagctgaagtcaaaaagcctggcgcaaccgtcaagatctcgtgcaaaggatcagggttcaacatcg |
| lentivirus | | aggactactacatccattgggtgcaacaggcacccggaaaaggcctggagtggatggggaggattgacccaga |
| | | aaatgacgaaaccaagtacggaccgatcttccaaggacgggtgaccatcacggctgacacttccactaacaccgt |
| | | ctacatggaactctcgagccttcgctcggaagataccgcggtgtactactgcgcctttagaggtggagtctactggg |
| | | gacaagggactaccgtcaccgtgtcgtcaggtggcggaggatcaggcggaggcggctccggtggaggaggaa |
| | | gcggaggaggtggctccgacgtggtgatgacgcagtcaccggactccttggcggtgagcctgggtgaacgcgc |
| | | cactatcaactgcaagagctcccagagcttgctggactccgatggaaagacttatctcaattggctgcaacagaag |
| | | cctggccagccgccaaagagactcatctcactggtgagcaagctggatagcggagtgccagatcggttttcggga |
| | | tcgggctcaggcaccgacttcaccctgactatttcctccctccaagccgaggatgtggccgtctactactgttggca |
| | | ggggactcacttcccggggaccttcggtggaggcactaaggtggagatcaaaaccactaccccagcaccgagg |
| | | ccacccaccccggctcctaccatcgcctcccagcctctgtccctgcgtccggaggcatgtagacccgcagctggt |
| | | ggggccgtgcatacccggggtcttgacttcgcctgcgatatctacatttgggcccctctggctggtacttgcggggt |
| | | cctgctgctttcactcgtgatcactctttactgtaagcgcggtcggaagaagctgctgtacatctttaagcaaccc |
| | | ttcatgaggcctgtgcagactactcaagaggaggacggctgttcatgccggttcccagaggaggaggaaggcggct |
| | | gcgaactgcgcgtgaaattcagccgcagcgcagatgctccagcctacaagcaggggcagaaccagctctacaa |
| | | cgaactcaatcttggtcggagagaggagtacgacgtgctggacaagcggagaggacgggacccagaaatggg |
| | | cgggaagccgcgcagaaagaatccccaagagggcctgtacaacgagctccaaaaggataagatggcagaagc |
| | | ctatagcgagattggtatgaaaggggaacgcagaagaggcaaaggccacgacggactgtaccagggactcagc |
| | | accgccaccaaggacacctatgacgctcttcacatgcaggccctgccgcctcgg |
| CAR1 - Full - | SEQ ID NO: | malpvtalllplalllhaarpeiqlvqsgaevkkpgatvkisckgsgfniedyyihwvqqapgkglewmgri |
| aa | 1363 | dpendetkvgpifqgrvtitadtstntvymelsslisedtavyycafrggvywgqgttvtvssggggsggggs |
| | | ggggsggggsdvvmtqspdslayslgeratinckssqslldsdgktylnwlqqkpgqppkrlislvskldsg |
| | | vpdrfsgsgsgtdftltisslqaedvavyycwqgthfpgtfgggtkveiktttpaprpptpaptiasqplslrpea |
| | | crpaaggavhfigldfacdiyiwaplagtcgvlllslvitlyckrgrkkllyifkqpfmrpvqttqeedgcscrfpe |
| | | eeeggcelrvkfsrsadapaykqgqnqlynelnlgrreeydvldlargrdpemggkprrknpqeglynelqk |
| | | dkmaeayseigmkgerrrgkghdglyqglstatkdtydalhmqalppr |

CAR 2

| | | |
|---|---|---|
| CAR2 scFv | SEQ ID NO: | dvvmtqspdslayslgeratinckssqslldsdgktylnwlqqkpgqpplalislvskldsgvpdrfsgsgsgtd |
| domain | 1364 | ftltisslqaedvavyycwqgthfpgtfgggtkveikggggsggggsggggsggggseiqlvqsgaevkkpg |
| | | atvkisckgsgfniedyyihwvqqapgkglewmgridpendetkygpifqgrvtitadtstntvymelsslrs |
| | | edtavyycafrggvywgqgttvtvss |
| CAR2 scFv | SEQ ID NO: | gatgtcgtgatgacccagtccccagactccctcgcagtgtccttgggagaacgggccaccatcaactgcaaatcg |
| domain - nt | 1365 | agccagtcactgctggactcagacggaaagacctacctcaactggctgcagcagaagcctggccagccaccga |
| | | agcgcctgatctccctggtgtccaagctggactcgggcgtcccggacaggtttagcggtagcggctcgggaacc |
| | | gacttcactctgaccattagctcgctccaagctgaagatgtggcggtctactactgctggcaggggacccacttccc |
| | | cgggacctttggcggaggaactaaagtcgaaatcaaaggaggaggcggatcaggtggaggaggcagcggag |
| | | gaggagggagcggcggtggcggctccgaaattcaacttgtgcaatccggtgccgaggtgaagaaacctggtgc |
| | | cactgtcaagatctcgtgtaagggatcgggattcaatatcgaggactactacatccactgggtgcaacaggcgcca |
| | | ggaaagggattggagtggatgggtcgcatcgacccggaaaacgatgagactaagtacggaccgatcttccaagg |
| | | ccgggtcacgatcactgcggatacctccactaataccgtgtatatggagctctcgtcactgagaagcgaagatacg |
| | | gccgtgtactactgcgcattcagaggaggtgtgtactggggccagggaactactgtgaccgtgtcgtcg |
| CAR2 - | SEQ ID NO: | atggccctccctgtcaccgccctgctgcttccgctggctcttctgctccacgccgctcggcccgatgtcgtgatgac |
| Soluble scFv - | 1366 | ccagtccccagactccctcgcagtgtccttgggagaacgggccaccatcaactgcaaatcgagccagtcactgct |
| nt | | ggactcagacggaaagacctacctcaactggctgcagcagaagcctggccagccaccgaagcgcctgatctcc |
| | | ctggtgtccaagctggactcgggcgtcccggacaggtttagcggtagcggctcgggaaccgacttcactctgacc |
| | | attagctcgctccaagctgaagatgtggcggtctactactgctggcaggggacccacttccccgggacctttggcg |
| | | gaggaactaaagtcgaaatcaaaggaggaggcggatcaggtggaggaggcagcggaggaggagggagcgg |
| | | cggtggcggctccgaaattcaacttgtgcaatccggtgccgaggtgaagaaacctggtgccactgtcaagatctc |
| | | gtgtaagggatcgggattcaatatcgaggactactacatccactgggtgcaacaggcgccaggaaagggattgg |
| | | agtggatgggtcgcatcgacccggaaaacgatgagactaagtacggaccgatcttccaaggccgggtcacgatc |
| | | actgcggatacctccactaataccgtgtatatggagctctcgtcactgagaagcgaagatacggccgtgtactactg |
| | | cgcattcagaggaggtgtgtactggggccagggaactactgtgaccgtgtcgtcggggtcacatcaccaccatca |
| | | tcatcaccac |
| CAR2 - | SEQ ID NO: | malpvtalllplalllhaarpdvvmtqspdslayslgeratinckssqslldsdgktylnwlqqkpgqpplalisl |
| Soluble scFv - | 1367 | vskldsgvpdrfsgsgsgtdftltisslqaedvavyycwqgthfpgtfgggtkveikggggsggggsggggsg |
| aa | | gggseiqlvqsgaevkkpgatvkisckgsgfniedyyihwvqqapgkglewmgridpendetkygpifqgr |
| | | vtitadtstntvymelsslrsedtavyycafrggvywgqgttvtvssgshhhhhhhh |
| CAR2 - Full - | SEQ ID NO: | atggccctccctgtcaccgccctgctgcttccgctggctcttctgctccacgccgctcggcccgacgtggtcatgac |
| nt | 1368 | tcaaagcccagattccttggctgtctcccttggagaaagagcaacgatcaattgcaaaagctcgcagtccctgttgg |
| | | actccgatggaaaaacctacctcaactggctgcagcagaagccgggacaaccaccaaagcggctgatttccctc |
| | | gtgtccaagctggacagcggcgtgccggatcgcttctcgggcagcggctcgggaaccgattttactctcactatttc |
| | | gtcactgcaagcggaggacgtggcggtgtattactgctggcagggcactcacttcccgggtacttttggtggaggt |
| | | accaaagtcgaaatcaagggtggaggcgggagcggaggaggcgggtcgggaggaggaggatcgggtggcg |
| | | gaggctcagaaatccagctggtgcagtcaggtgccgaagtgaagaagcctggggccacggtgaagatctcgtg |
| | | caaggggagcggattcaacatcgaggattactacatccattgggtgcaacaggcccctggcaaagggctggaat |
| | | ggatgggaaggatcgaccccgagaatgacgagactaagtacggcccgatcttccaaggacgggtgaccatcact |
| | | gcagacacttcaaccaacaccgtctacatggaactctcctcgctgcgctccgaggacaccgccgtgtactactgtg |
| | | ctttcagaggaggagtctactggggacagggaacgaccgtgaccgtcagctcaaccactaccccagcaccgag |
| | | gccacccaccccggctcctaccatcgcctcccagcctctgtccctgcgtccggaggcatgtagacccgcagctgg |
| | | tggggccgtgcatacccggggtcttgacttcgcctgcgatatctacatttgggcccctctggctggtacttgcgggg |
| | | tcctgctgctttcactcgtgatcactctttactgtaagcgcggtcggaagaagctgctgtacatctttaagcaaccc |
| | | ttcatgaggcctgtgcagactactcaagaggaggacggctgttcatgccggttcccagaggaggaggaaggcggct |
| | | gcgaactgcgcgtgaaattcagccgcagcgcagatgctccagcctacaagcaggggcagaaccagctctacaa |
| | | cgaactcaatcttggtcggagagaggagtacgacgtgctggacaagcggagaggacgggacccagaaatggg |
| | | cgggaagccgcgcagaaagaatccccaagagggcctgtacaacgagctccaaaaggataagatggcagaagc |
| | | ctatagcgagattggtatgaaaggggaacgcagaagaggcaaaggccacgacggactgtaccagggactcagc |
| | | accgccaccaaggacacctatgacgctcttcacatgcaggccctgccgcctcgg |
| CAR2 - Full - | SEQ ID NO: | malpvtalllplalllhaarpdvvmtqspdslavslgeratinckssqslldsdgktylnwlqqkpgqppkrlis |
| aa | 1369 | lvskldsgvpdrfsgsgsgtdftltisslqaedvavyycwqgthfpgtfgggtkveikggggsggggsggggs |
| | | ggggseiqlvqsgaevkkpgatvkisckgsgfniedyyihwvqqapgkglewmgridpendetkygpif |
| | | qgrvtitadtstntvymelsslrsedtavyycafrggvywgqgttvtvsstttpaprpptpaptiasqplslrpeac |
| | | rpaaggavhtrgldfacdiyiwaplagtcgvlllslvitlyckrgrkkllyifkqpfmrpvqttqeedgcscrfpee |
| | | eeggcelrvkfsrsadapaykqgqnqlynelnlgrreeydvldlargrdpemggkprrknpqeglynelqkd |
| | | kmaeayseigmkgerrrgkghdglyqglstatkdtydalhmqalppr |

CAR 3

| | | |
|---|---|---|
| CAR3 scFv | SEQ ID NO: | eiqlvqsgaevkkpgeslrisckgsgfniedyyihwvrqmpgkglewmgridpendetkygpifqghvtis |
| domain | 1370 | adtsintvylqwsslkasdtamyycafrggvywgqgttvtvssggggsggggsggggsggggsdvvmtqs |
| | | plslpvtlgqpasisckssqslldsdgktylnwlqqrpgqsprrlislvskldsgvpdrfsgsgsgtdftlkisrvea |
| | | edvgvyycwqgthfpgtfgggtkveik |
| CAR3 scFv | SEQ ID NO: | gagattcagctggtccaaagcggcgcagaagtgaaaaagccaggggaatcgttgcgcatcagctgtaaaggttc |
| domain nt | 1371 | cggcttcaacatcgaggactattacatccattgggtgcggcagatgccaggaaaggggctggaatggatgggac |
| | | ggattgacccggagaacgacgaaaccaagtacggaccgatctttcaaggacacgtgactatctccgccgacacc |
| | | agcatcaatacggtgtacctccaatggtcctcactcaaggcctcggataccgcgatgtactactgcgcgttcagag |
| | | gaggcgtctactggggacaagggactactgtgactgtctcatcaggaggtggaggaagcggaggaggtggctc |
| | | gggcggaggtggatcgggaggaggagggtccgatgtggtgatgacccagtccccactgtcgctcccggtgacc |
| | | ctcggacagcctgctagcatctcgtgcaaatcctcgcaatccctgctggactcggacggaaaaacgtacctcaatt |
| | | ggctgcagcagcgccctggccagagcccgagaaggcttatctcgctggtgtcaaagctggatagcggtgtgccc |
| | | gaccggttcagcggctcagggtcaggaaccgatttcaccttgaagatctcccgcgtggaagccgaagatgtcgga |
| | | gtctactactgctggcagggtactcacttcccggggacctttggtggcggcactaaggtcgagattaag |
| CAR3 - | SEQ ID NO: | atggccctccctgtcaccgccctgctgcttccgctggctcttctgctccacgccgctcggcccgagattcagctggt |
| Soluble scFv - | 1372 | ccaaagcggcgcagaagtgaaaaagccaggggaatcgttgcgcatcagctgtaaaggttccggcttcaacatcg |
| nt | | aggactattacatccattgggtgcggcagatgccaggaaaggggctggaatggatgggacggattgacccggag |
| | | aacgacgaaaccaagtacggaccgatctttcaaggacacgtgactatctccgccgacaccagcatcaatacggtg |
| | | tacctccaatggtcctcactcaaggcctcggataccgcgatgtactactgcgcgttcagaggaggcgtctactggg |
| | | gacaagggactactgtgactgtctcatcaggaggtggaggaagcggaggaggtggctcgggcggaggtggatc |
| | | gggaggaggagggtccgatgtggtgatgacccagtccccactgtcgctcccggtgaccctcggacagcctgcta |
| | | gcatctcgtgcaaatcctcgcaatccctgctggactcggacggaaaaacgtacctcaattggctgcagcagcgcc |
| | | ctggccagagcccgagaaggcttatctcgctggtgtcaaagctggatagcggtgtgcccgaccggttcagcggct |
| | | cagggtcaggaaccgatttcaccttgaagatctcccgcgtggaagccgaagatgtcggagtctactactgctggca |
| | | gggtactcacttcccggggacctttggtggcggcactaaggtcgagattaagggctcacaccatcatcaccatcac |
| | | caccac |
| CAR3 - | SEQ ID NO: | malpvtalllplalllhaarpeiqlvqsgaevkkpgeslrisckgsgfniedyyihwvrqmpgkglewmgrid |
| Soluble scFv - | 1373 | pendetkygpifqghvtisadtsintvylqwsslkasdtamyycafrggvywgqgttvtvssggggsggggs |
| aa | | ggggsggggsdvvmtqsplslpvtlgqpasisckssqslldsdgktylnwlqqrpgqsprrlislvskldsgvp |
| | | drfsgsgsgtdftlkisrveaedvgvyycwqgthfpgtfgggtkveikgshhhhhhhh |
| CAR3 - Full - | SEQ ID NO: | atggccctccctgtcaccgccctgctgcttccgctggctcttctgctccacgccgctcggcccgaaatccagctggt |
| nt | 1374 | gcaaagcggagccgaggtgaagaagcccggagaatccctgcgcatctcgtgtaagggttccggctttaacatcg |
| | | aggattactacatccactgggtgagacagatgccgggcaaaggtctggaatggatgggccgcatcgacccggag |
| | | aacgacgaaaccaaatacggaccaatcttccaaggacatgtgactatttccgcggatacctccatcaacactgtcta |
| | | cttgcagtggagctcgctcaaggcgtcggataccgccatgtactactgcgcattcagaggaggtgtgtactgggg |
| | | ccagggcactacggtcaccgtgtcctcgggaggtggagggtcaggaggcggaggctcgggcggtggaggatc |
| | | aggcggaggaggaagcgatgtggtcatgactcaatccccactgtcactgcctgtcactctggggcaaccggcttc |
| | | catctcatgcaagtcaagccaatcgctgctcgactccgacggaaaaacctacctcaattggcttcagcagcgccca |
| | | ggccagtcgcctcggaggctgatctcactcgtgtcgaagcttgactccggggtgccggatcggtttagcggaagc |
| | | ggatcggggaccgacttcacgttgaagattagccgggtggaagccgaggacgtgggagtctattactgctggca |
| | | ggggacccacttcccggggactttcggaggaggcaccaaagtcgagattaagaccactaccccagcaccgagg |
| | | ccacccaccccggctcctaccatcgcctcccagcctctgtccctgcgtccggaggcatgtagacccgcagctggt |
| | | ggggccgtgcatacccggggtcttgacttcgcctgcgatatctacatttgggcccctctggctggtacttgcggggt |
| | | cctgctgctttcactcgtgatcactctttactgtaagcgcggtcggaagaagctgctgtacatctttaagcaaccc |
| | | ttcatgaggcctgtgcagactactcaagaggaggacggctgttcatgccggttcccagaggaggaggaaggcggct |
| | | gcgaactgcgcgtgaaattcagccgcagcgcagatgctccagcctacaagcaggggcagaaccagctctacaa |
| | | cgaactcaatcttggtcggagagaggagtacgacgtgctggacaagcggagaggacgggacccagaaatggg |
| | | cgggaagccgcgcagaaagaatccccaagagggcctgtacaacgagctccaaaaggataagatggcagaagc |
| | | ctatagcgagattggtatgaaaggggaacgcagaagaggcaaaggccacgacggactgtaccagggactcagc |
| | | accgccaccaaggacacctatgacgctcttcacatgcaggccctgccgcctcgg |
| CAR3 Full - | SEQ ID NO: | malpvtalllplalllhaarpeiqlvqsgaevkkpgeslrisckgsgfniedyyihwvrqmpgkglewmgrid |
| aa | 1375 | pendetkygpifqghvtisadtsintvylqwsslkasdtamyycafrggvywgqgttvtvssggggsgggg |
| | | sggggsggggsdvvmtqsplslpvtlgqpasisckssqslldsdgktylnwlqqrpgqsprrlislvskldsg |
| | | vpdrfsgsgsgtdftlkisrveaedvgvyycwqgthfpgtfgggtkveiktttpaprpptpaptiasqplslrpe |
| | | acrpaaggavhtrgldfacdiyiwaplagtcgvlllslvitlyckrgrkkllyifkqpfmrpvqttqeedgcscrfp |
| | | eeeeggcelrvkfsrsadapaykqgqnqlynelnlgrreeydvldlargrdpemggkprrknpqeglynelq |
| | | kdkmaeayseigmkgerrrgkghdglyqglstatkdtydalhmqalppr |

CAR 4

| | | |
|---|---|---|
| CAR4 scFv | SEQ ID NO: | dvvmtqsplslpvtlgqpasisckssqslldsdgktylnwlqqrpgqsprrlislvskldsgvpdrfsgsgsgtdf |
| domain | 1376 | tlkisrveaedvgvyycwqgthfpgtfgggtkveikggggsggggsggggsggggseiqlvqsgaevkkpg |
| | | eslrisckgsgfniedyyihwvrqmpgkglewmgridpendetkygpifqghvtisadtsintvylqwsslka |
| | | sdtamyycafrggvywgqgttvtvss |
| CAR4 scFv | SEQ ID NO: | gacgtcgtcatgacccagagcccgctgtcactgcctgtgaccctgggccagccggcgtccattagctgcaaatcc |
| domain nt | 1377 | tcgcaatccctgctcgactcagacggaaaaacgtacttgaactggctccaacagcgccctgggcaatccccaagg |
| | | cggcttatctcactcgtcagcaagctcgatagcggtgtcccagacagattttcgggctcgggatcgggcactgattt |
| | | cactctgaagatctcgcgggtggaagccgaggatgtgggagtgtactattgctggcagggcactcacttccccgg |
| | | gacgtttggcggaggaactaaggtcgagatcaaaggaggaggtggatcaggcggaggtgggagcggaggag |
| | | gaggaagcggtggtggaggttccgaaatccagctggtgcaatcaggagccgaggtgaagaagccgggagaat |
| | | ccctgcgcatctcgtgcaagggctcgggcttcaacatcgaggattactacatccactgggtgcggcagatgccgg |
| | | gaaaggggttggaatggatgggacgcattgacccggaaaatgatgaaaccaaatacgggccaatcttccaaggc |
| | | cacgtgaccattagcgctgacacttccatcaacaccgtgtaccttcagtggtcctcactgaaggcgtcggacactgc |
| | | catgtactactgtgcattcagaggaggggtctactggggacagggcaccaccgtgaccgtgagctcc |
| CAR4 - | SEQ ID NO: | atggccctccctgtcaccgccctgctgcttccgctggctcttctgctccacgccgctcggcccgacgtcgtcatgac |
| Soluble scFv - | 1378 | ccagagcccgctgtcactgcctgtgaccctgggccagccggcgtccattagctgcaaatcctcgcaatccctgctc |
| nt | | gactcagacggaaaaacgtacttgaactggctccaacagcgccctgggcaatccccaaggcggcttatctcactc |
| | | gtcagcaagctcgatagcggtgtcccagacagattttcgggctcgggatcgggcactgatttcactctgaagatctc |
| | | gcgggtggaagccgaggatgtgggagtgtactattgctggcagggcactcacttccccgggacgtttggcggag |
| | | gaactaaggtcgagatcaaaggaggaggtggatcaggcggaggtgggagcggaggaggaggaagcggtggt |
| | | ggaggttccgaaatccagctggtgcaatcaggagccgaggtgaagaagccgggagaatccctgcgcatctcgtg |
| | | caagggctcgggcttcaacatcgaggattactacatccactgggtgcggcagatgccgggaaaggggttggaat |
| | | ggatgggacgcattgacccggaaaatgatgaaaccaaatacgggccaatcttccaaggccacgtgaccattagc |
| | | gctgacacttccatcaacaccgtgtaccttcagtggtcctcactgaaggcgtcggacactgccatgtactactgtgc |
| | | attcagaggaggggtctactggggacagggcaccaccgtgaccgtgagctccggctcgcatcaccatcatcacc |
| | | accatcac |
| CAR4 - | SEQ ID NO: | malpvtalllplalllhaarpdvvmtqsplslpvtlgqpasisckssqslldsdgktylnwlqqrpgqsprrlislv |
| Soluble scFv - | 1379 | skldsgvpdrfsgsgsgtdftlkisrveaedvgvyycwqgthfpgtfgggtkveikggggsggggsggggsg |
| aa | | gggseiqlvqsgaevkkpgeslrisckgsgfniedyyihwvrqmpgkglewmgridpendetkygpifqg |
| | | hvtisadtsintvylqwsslkasdtamyycafrggvywgqgttvtvssgshhhhhhhh |
| CAR4 - Full - | SEQ ID NO: | atggccctccctgtcaccgccctgctgcttccgctggctcttctgctccacgccgctcggcccgacgtcgtcatgac |
| nt | 1380 | ccaatcccctctctccctgccggtcaccctgggtcagccggcgtcgatctcatgcaaaagctcacagtccctgctg |
| | | gattcggacggaaaaacctacttgaactggctccaacagaggccgggtcagtcccctcgcagactgatctcgctg |
| | | gtgagcaagctcgactcgggtgtgccggatcggttctccgggtcaggatcgggcaccgactttacgctcaagattt |
| | | cgagagtggaggccgaggatgtgggagtgtactattgctggcagggcacgcatttccccgggacctttggaggc |
| | | gggactaaggtggaaatcaagggaggtggcggatcaggcggaggaggcagcggcggaggtggatcaggag |
| | | gcggagggtcagagatccagctggtccaaagcggagcagaggtgaagaagccaggcgagtcccttcgcatttc |
| | | gtgcaaagggagcggcttcaacattgaagattactacatccactgggtgcggcaaatgccaggaaagggtctgga |
| | | atggatgggacggatcgacccagaaaatgatgaaactaagtacggaccgatcttccaaggacacgtcactatctc |
| | | cgcggacacttcgatcaacaccgtgtacctccagtggagcagcttgaaagcctccgacaccgctatgtactactgt |
| | | gccttccgcggaggagtctactggggacaggggactactgtgaccgtgtcgtccaccactaccccagcaccgag |
| | | gccacccaccccggctcctaccatcgcctcccagcctctgtccctgcgtccggaggcatgtagacccgcagctgg |
| | | tggggccgtgcatacccggggtcttgacttcgcctgcgatatctacatttgggcccctctggctggtacttgcgggg |
| | | tcctgctgctttcactcgtgatcactctttactgtaagcgcggtcggaagaagctgctgtacatctttaagcaaccc |
| | | ttcatgaggcctgtgcagactactcaagaggaggacggctgttcatgccggttcccagaggaggaggaaggcggct |
| | | gcgaactgcgcgtgaaattcagccgcagcgcagatgctccagcctacaagcaggggcagaaccagctctacaa |
| | | cgaactcaatcttggtcggagagaggagtacgacgtgctggacaagcggagaggacgggacccagaaatggg |
| | | cgggaagccgcgcagaaagaatccccaagagggcctgtacaacgagctccaaaaggataagatggcagaagc |
| | | ctatagcgagattggtatgaaaggggaacgcagaagaggcaaaggccacgacggactgtaccagggactcagc |
| | | accgccaccaaggacacctatgacgctcttcacatgcaggccctgccgcctcgg |
| CAR4 - Full - | SEQ ID NO: | malpvtalllplalllhaarpdvvmtqsplslpvtlgqpasisckssqslldsdgktylnwlqqrpgqsprrlisl |
| aa | 1381 | vskldsgvpdrfsgsgsgtdftlkisrveaedvgvyycwqgthfpgtfgggtkveikggggsggggsggggs |
| | | ggggseiqlvqsgaevkkpgeslrisckgsgfniedyyihwvrqmpgkglewmgridpendetkygpif |
| | | qghvtisadtsintvylqwsslkasdtamyycafrggvywgqgttvtvsstapaprpptpaptiasqplslrpe |
| | | acrpaaggavhtrgldfacdiyiwaplagtcgvlllslvitlyckrgrkkllyifkqpfmrpvqttqeedgcscrfp |
| | | eeeeggcelrvkfsrsadapaykqgqnqlynelnlgrreeydvldlargrdpemggkprrknpqeglynelq |
| | | kdkmaeayseigmkgerrrgkghdglyqglstatkdtydalhmqalppr |

CAR 5

| | | |
|---|---|---|
| CAR5 scFv | SEQ ID NO: | eiqlvqsgaevkkpgatvkisckgsgfniedyyihwvqqapgkglewmgridpendetkygpifqgrvtita |
| domain | 1382 | dtstntvymelsslrsedtavyycafrggvywgqgttvtvssggggsggggsggggsggggsdvvmtqspls |
| | | lpvtlgqpasisckssqslldsdgktylnwlqqrpgqsprrlislvskldsgvpdrfsgsgsgtdftlkisrveaed |
| | | vgvyycwqgthfpgtfgggtkveik |
| CAR5 scFv | SEQ ID NO: | gaaatccagctcgtgcagagcggagccgaggtcaagaaaccgggtgctaccgtgaagatttcatgcaagggatc |
| domain nt | 1383 | gggcttcaacatcgaggattactacatccactgggtgcagcaggcaccaggaaaaggacttgaatggatgggcc |
| | | ggatcgacccggaaaatgacgagactaagtacggccctatcttccaaggacgggtgacgatcaccgcagacact |
| | | agcaccaacaccgtctatatggaactctcgtccctgaggtccgaagatactgccgtgtactactgtgcgtttcgcgg |
| | | aggtgtgtactggggacagggtaccaccgtcaccgtgtcatcgggcggtggaggctccggtggaggagggtca |
| | | ggaggcggtggaagcggaggaggcggcagcgacgtggtcatgactcaatcgccgctgtcgctgcccgtcactc |
| | | tgggacaacccgcgtccatcagctgcaaatcctcgcagtcactgcttgactccgatggaaagacctacctcaactg |
| | | gctgcagcaacgcccaggccaatccccaagacgcctgatctcgttggtgtcaaagctggactcaggggtgccgg |
| | | accggttctccgggagcgggtcgggcacggatttcactctcaagatctccagagtggaagccgaggatgtggga |
| | | gtctactactgctggcagggaacccatttccctggaacttttggcggaggaactaaggtcgagattaaa |
| CAR5 - | SEQ ID NO: | atggccctccctgtcaccgccctgctgcttccgctggctcttctgctccacgccgctcggcccgaaatccagctcgt |
| Soluble scFv - | 1384 | gcagagcggagccgaggtcaagaaaccgggtgctaccgtgaagatttcatgcaagggatcgggcttcaacatcg |
| nt | | aggattactacatccactgggtgcagcaggcaccaggaaaaggacttgaatggatgggccggatcgacccgga |
| | | aaatgacgagactaagtacggccctatcttccaaggacgggtgacgatcaccgcagacactagcaccaacaccg |
| | | tctatatggaactctcgtccctgaggtccgaagatactgccgtgtactactgtgcgtttcgcggaggtgtgtactggg |
| | | gacagggtaccaccgtcaccgtgtcatcgggcggtggaggctccggtggaggagggtcaggaggcggtggaa |
| | | gcggaggaggcggcagcgacgtggtcatgactcaatcgccgctgtcgctgcccgtcactctgggacaacccgc |
| | | gtccatcagctgcaaatcctcgcagtcactgcttgactccgatggaaagacctacctcaactggctgcagcaacgc |
| | | ccaggccaatccccaagacgcctgatctcgttggtgtcaaagctggactcaggggtgccggaccggttctccggg |
| | | agcgggtcgggcacggatttcactctcaagatctccagagtggaagccgaggatgtgggagtctactactgctgg |
| | | cagggaacccatttccctggaacttttggcggaggaactaaggtcgagattaaagggagccaccatcatcatcacc |
| | | accaccac |
| CAR5 - | SEQ ID NO: | malpvtalllplalllhaarpeiqlvqsgaevkkpgatvkisckgsgfniedyyihwvqqapgkglewmgrid |
| Soluble scFv - | 1385 | pendetkygpifqgrvtitadtstntvymelsslrsedtavyycafrggvywgqgttvtvssggggsggggsgg |
| aa | | ggsggggsdvvmtqsplslpvtlgqpasisckssqslldsdgktylnwlqqrpgqsprrlislvskldsgvpdrf |
| | | sgsgsgtdftlkisrveaedvgvyycwqgthfpgtfgggtkveikgshhhhhhhh |
| CAR5 - Full - | SEQ ID NO: | atggccctccctgtcaccgccctgctgcttccgctggctcttctgctccacgccgctcggcccgaaatccagctcgt |
| nt | 1386 | gcagagcggagccgaggtcaagaaaccgggtgctaccgtgaagatttcatgcaagggatcgggcttcaacatcg |
| | | aggattactacatccactgggtgcagcaggcaccaggaaaaggacttgaatggatgggccggatcgacccgga |
| | | aaatgacgagactaagtacggccctatcttccaaggacgggtgacgatcaccgcagacactagcaccaacaccg |
| | | tctatatggaactctcgtccctgaggtccgaagatactgccgtgtactactgtgcgtttcgcggaggtgtgtactggg |
| | | gacagggtaccaccgtcaccgtgtcatcgggcggtggaggctccggtggaggagggtcaggaggcggtggaa |
| | | gcggaggaggcggcagcgacgtggtcatgactcaatcgccgctgtcgctgcccgtcactctgggacaacccgc |
| | | gtccatcagctgcaaatcctcgcagtcactgcttgactccgatggaaagacctacctcaactggctgcagcaacgc |
| | | ccaggccaatccccaagacgcctgatctcgttggtgtcaaagctggactcaggggtgccggaccggttctccggg |
| | | agcgggtcgggcacggatttcactctcaagatctccagagtggaagccgaggatgtgggagtctactactgctgg |
| | | cagggaacccatttccctggaacttttggcggaggaactaaggtcgagattaaaaccactaccccagcaccgagg |
| | | ccacccaccccggctcctaccatcgcctcccagcctctgtccctgcgtccggaggcatgtagacccgcagctggt |
| | | ggggccgtgcatacccggggtcttgacttcgcctgcgatatctacatttgggcccctctggctggtacttgcggggt |
| | | cctgctgctttcactcgtgatcactctttactgtaagcgcggtcggaagaagctgctgtacatctttaagcaaccc |
| | | ttcatgaggcctgtgcagactactcaagaggaggacggctgttcatgccggttcccagaggaggaggaaggcggct |
| | | gcgaactgcgcgtgaaattcagccgcagcgcagatgctccagcctacaagcaggggcagaaccagctctacaa |
| | | cgaactcaatcttggtcggagagaggagtacgacgtgctggacaagcggagaggacgggacccagaaatggg |
| | | cgggaagccgcgcagaaagaatccccaagagggcctgtacaacgagctccaaaaggataagatggcagaagc |
| | | ctatagcgagattggtatgaaaggggaacgcagaagaggcaaaggccacgacggactgtaccagggactcagc |
| | | accgccaccaaggacacctatgacgctcttcacatgcaggccctgccgcctcgg |
| CAR5 - Full - | SEQ ID NO: | malpvtalllplalllhaarpeiqlvqsgaevkkpgatvkisckgsgfniedyyihwvqqapgkglewmgri |
| aa | 1387 | dpendetkygpifqgrvtitadtstntvymelsslrsedtavyycafrggvywgqgttvtvssggggsggggs |
| | | ggggsggggsdvvmtqsplslpvtlgqpasisckssqslldsdgtylnwlqqrpgqsprrlislvskldsgv |
| | | pdrfsgsgsgtdftlkisrveaedvgvyycwqgthfpgtfgggtkveiktttpaprpptpaptiasqplslrpeac |
| | | rpaaggavhtrgldfacdiyiwaplagtcgvlllslvitlyckrgrkkllyifkqpfmrpvqttqeedgcscrfpee |
| | | eeggcelrvkfsrsadapaykqgqnqlynelnlgrreeydvldlargrdpemggkprrknpqeglynelqkd |
| | | kmaeayseigmkgerrrgkghdglyqglstatkdtydalhmqalppr |

CAR 6

| | | |
|---|---|---|
| CAR6 | SEQ ID NO: | eiqlvqsgaevkkpgeslrisckgsgfniedyyihwvrqmpgkglewmgridpendetkygpifqghvtis |
| scFv domain | 1388 | adtsintvylqwsslkasdtamyycafrggvywgqgttvtvssggggsggggsggggsggggsdvvmtqs |
| | | pdslayslgeratinckssqslldsdgktylnwlqqkpgqppkrlislvskldsgvpdrfsgsgsgtdftltisslqa |
| | | edvavyycwqgthfpgtfgggtkveik |
| CAR6 scFv | SEQ ID NO: | gaaatccagctggtgcagtcaggcgccgaggtcaagaagccgggagagtcgctgagaatctcgtgcaagggct |
| domain nt | 1389 | cggggttcaacatcgaggactactacattcactgggtcaggcagatgccgggaaagggactggaatggatgggc |
| | | cggatcgacccagaaaatgacgaaaccaaatacgggccgatttttcaaggccacgtgactatcagcgcagacac |
| | | gagcatcaacactgtctacctccagtggtcctcgcttaaggccagcgataccgctatgtactactgcgcattcagag |
| | | gcggggtgtactggggacaaggaaccactgtgaccgtgagcagcggaggtggcggctcgggaggaggtggg |
| | | agcggaggaggaggttccggcggtggaggatcagatgtcgtgatgacccagtccccggactccctcgctgtctc |
| | | actgggcgagcgcgcgaccatcaactgcaaatcgagccagtcgctgttggactccgatggaaagacttatctgaa |
| | | ttggctgcaacagaaaccaggacaacctcccaagcggctcatctcgcttgtgtcaaaactcgattcgggagtgcca |
| | | gaccgcttctcggggtccgggagcggaactgactttactttgaccatttcctcactgcaagcggaggatgtggccg |
| | | tgtattactgttggcagggcacgcatttccctggaaccttcggtggcggaactaaggtggaaatcaag |
| CAR6 - | SEQ ID NO: | atggccctccctgtcaccgccctgctgcttccgctggctcttctgctccacgccgctcggcccgaaatccagctggt |
| Soluble scFv - | 1390 | gcagtcaggcgccgaggtcaagaagccgggagagtcgctgagaatctcgtgcaagggctcggggttcaacatc |
| nt | | gaggactactacattcactgggtcaggcagatgccgggaaagggactggaatggatgggccggatcgacccag |
| | | aaaatgacgaaaccaaatacgggccgatttttcaaggccacgtgactatcagcgcagacacgagcatcaacactg |
| | | tctacctccagtggtcctcgcttaaggccagcgataccgctatgtactactgcgcattcagaggcggggtgtactgg |
| | | ggacaaggaaccactgtgaccgtgagcagcggaggtggcggctcgggaggaggtgggagcggaggaggag |
| | | gttccggcggtggaggatcagatgtcgtgatgacccagtccccggactccctcgctgtctcactgggcgagcgcg |
| | | cgaccatcaactgcaaatcgagccagtcgctgttggactccgatggaaagacttatctgaattggctgcaacagaa |
| | | accaggacaacctcccaagcggctcatctcgcttgtgtcaaaactcgattcgggagtgccagaccgcttctcggg |
| | | gtccgggagcggaactgactttactttgaccatttcctcactgcaagcggaggatgtggccgtgtattactgttggca |
| | | gggcacgcatttccctggaaccttcggtggcggaactaaggtggaaatcaagggatcacaccaccatcatcacca |
| | | tcaccaccat |
| CAR6 - | SEQ ID NO: | malpvtalllplalllhaarpeiqlvqsgaevkkpgeslrisckgsgfniedyyihwvrqmpgkglewmgrid |
| Soluble scFv - | 1391 | pendetkygpifqghvtisadtsintvylqwsslkasdtamyycafrggvywgqgttvtvssggggsggggs |
| aa | | ggggsggggsdvvmtqspdslayslgeratinckssqslldsdgktylnwlqqkpgqpplalislvskldsgv |
| | | pdrfsgsgsgtdftltisslqaedvavyycwqgthfpgtfgggtkveikgshhhhhhhhh |
| CAR6 - | SEQ ID NO: | atggccctccctgtcaccgccctgctgcttccgctggctcttctgctccacgccgctcggcccgagattcagctcgt |
| Full - nt | 1392 | gcaatcgggagcggaagtcaagaagccaggagagtccttgcggatctcatgcaagggtagcggctttaacatcg |
| | | aggattactacatccactgggtgaggcagatgccggggaagggactcgaatggatgggacggatcgacccaga |
| | | aaacgacgaaactaagtacggtccgatcttccaaggccatgtgactattagcgccgatacttcaatcaataccgtgt |
| | | atctgcaatggtcctcattgaaagcctcagataccgcgatgtactactgtgctttcagaggaggggtctactgggga |
| | | cagggaactaccgtgactgtctcgtccggcggaggcgggtcaggaggtggcggcagcggaggaggagggtc |
| | | cggcggaggtgggtccgacgtcgtgatgacccagagccctgacagcctggcagtgagcctgggcgaaagagc |
| | | taccattaactgcaaatcgtcgcagagcctgctggactcggacggaaaaacgtacctcaattggctgcagcaaaa |
| | | gcctggccagccaccgaagcgccttatctcactggtgtcgaagctggattcgggagtgcccgatcgcttctccgg |
| | | ctcgggatcgggtactgacttcaccctcactatctcctcgcttcaagcagaggacgtggccgtctactactgctggc |
| | | agggaacccactttccgggaaccttcggcggagggacgaaagtggagatcaagaccactaccccagcaccgag |
| | | gccacccaccccggctcctaccatcgcctcccagcctctgtccctgcgtccggaggcatgtagacccgcagctgg |
| | | tggggccgtgcatacccggggtcttgacttcgcctgcgatatctacatttgggcccctctggctggtacttgcgggg |
| | | tcctgctgctttcactcgtgatcactctttactgtaagcgcggtcggaagaagctgctgtacatctttaagcaaccc |
| | | ttcatgaggcctgtgcagactactcaagaggaggacggctgttcatgccggttcccagaggaggaggaaggcggct |
| | | gcgaactgcgcgtgaaattcagccgcagcgcagatgctccagcctacaagcaggggcagaaccagctctacaa |
| | | cgaactcaatcttggtcggagagaggagtacgacgtgctggacaagcggagaggacgggacccagaaatggg |
| | | cgggaagccgcgcagaaagaatccccaagagggcctgtacaacgagctccaaaaggataagatggcagaagc |
| | | ctatagcgagattggtatgaaaggggaacgcagaagaggcaaaggccacgacggactgtaccagggactcagc |
| | | accgccaccaaggacacctatgacgctcttcacatgcaggccctgccgcctcgg |
| CAR6 - | SEQ ID NO: | malpvtalllplalllhaarpeiqlvqsgaevkkpgeslrisckgsgfniedyyihwvrqmpgkglewmgrid |
| Full - aa | 1393 | pendetkygpifqghvtisadtsintvylqwsslkasdtamyycafrqqvywgqgttvtvssggggsgggg |
| | | sggggsggggsdvvmtqspdslayslgeratinckssqslldsdgktylnwlqqkpgqpplalislvsklds |
| | | gvpdrfsgsgsgtdftltisslqaedvavyycwqgthfpgtfgggtkveiktttpaprpptpaptiasqplslrpe |
| | | acrpaaggavhtrgldfacdiyiwaplagtcgvlllslvitlyckrgrkkllyifkqpfmrpvqttqeedgcscrfp |
| | | eeeeggcelrvkfsrsadapaykqgqnqlynelnlgrreeydvldlargrdpemggkprrknpqeglynelq |
| | | kdkmaeayseigmkgerrrgkghdglyqglstatkdtydalhmqalppr |

CAR 7

| | | |
|---|---|---|
| CAR7 scFv | SEQ ID NO: | dvvmtqspdslayslgeratinckssqslldsdgktylnwlqqkpgqpplalislvskldsgvpdrfsgsgsgtd |
| domain | 1394 | ftltisslqaedvavyycwqgthfpgtfgggtkveikggggsggggsggggsggggseiqlvqsgaevkkpg |
| | | eslrisckgsgfniedyyihwvrqmpgkglewmgridpendetkygpifqghvtisadtsintvylqwsslka |
| | | sdtamyycafrggvywgqgttvtvss |
| CAR7 scFv | SEQ ID NO: | gacgtggtgatgacccaatcgccagattccctggcagtgtccctgggcgaacgcgccactattaactgcaaatcgt |
| domain nt | 1395 | cacagtccttgcttgattccgacggaaagacctacctcaattggctccagcagaagccaggacaaccgccaaaga |
| | | gactgatctccctggtgtcaaagctggactcgggagtgcctgatcggttctcgggtagcgggagcggcaccgact |
| | | tcactctgaccatctcgtcactccaggctgaggacgtggccgtgtattactgttggcagggtactcactttccgggca |
| | | ctttcggaggcggcaccaaggtggagattaaaggaggaggcggaagcggaggtggaggatcgggaggtggtg |
| | | ggagcggcggaggagggagcgagatccagctcgtccaatcgggagcggaagtgaagaagcccggagagtca |
| | | cttagaatctcatgcaaggggtcgggcttcaacatcgaggattactacatccattgggtccgccagatgcctggtaa |
| | | aggactggaatggatggggaggattgacccggaaaacgacgaaactaagtacggaccgatctttcaagggcac |
| | | gtgactatctccgctgatacctcaatcaatactgtctacctccagtggtcctcgctgaaagcaagcgacaccgcgat |
| | | gtactactgcgccttccggggaggagtgtactggggccaaggcaccacggtcacggtcagctcc |
| CAR7 - | SEQ ID NO: | atggccctccctgtcaccgccctgctgcttccgctggctcttctgctccacgccgctcggcccgacgtggtgatgac |
| Soluble scFv - | 1396 | ccaatcgccagattccctggcagtgtccctgggcgaacgcgccactattaactgcaaatcgtcacagtccttgcttg |
| nt | | attccgacggaaagacctacctcaattggctccagcagaagccaggacaaccgccaaagagactgatctccctg |
| | | gtgtcaaagctggactcgggagtgcctgatcggttctcgggtagcgggagcggcaccgacttcactctgaccatct |
| | | cgtcactccaggctgaggacgtggccgtgtattactgttggcagggtactcactttccgggcactttcggaggcgg |
| | | caccaaggtggagattaaaggaggaggcggaagcggaggtggaggatcgggaggtggtgggagcggcgga |
| | | ggagggagcgagatccagctcgtccaatcgggagcggaagtgaagaagcccggagagtcacttagaatctcat |
| | | gcaaggggtcgggcttcaacatcgaggattactacatccattgggtccgccagatgcctggtaaaggactggaat |
| | | ggatggggaggattgacccggaaaacgacgaaactaagtacggaccgatctttcaagggcacgtgactatctcc |
| | | gctgatacctcaatcaatactgtctacctccagtggtcctcgctgaaagcaagcgacaccgcgatgtactactgcgc |
| | | cttccggggaggagtgtactggggccaaggcaccacggtcacggtcagctccggctcccatcaccaccaccatc |
| | | accatcatcac |
| CAR7 - | SEQ ID NO: | malpvtalllplalllhaarpdvvmtqspdslayslgeratinckssqslldsdgktylnwlqqkpgqppkrlisl |
| Soluble scFv - | 1397 | vskldsgvpdrfsgsgsgtdftltisslqaedvavyycwqgthfpgtfgggtkveikggggsggggsggggsg |
| aa | | gggseiqlvqsgaevkkpgeslrisckgsgfniedyyihwvrqmpgkglewmgridpendetkygpifqg |
| | | hvtisadtsintvylqwsslkasdtamyycafrggvywgqgttvtvssgshhhhhhhhh |
| CAR7 | SEQ ID NO: | atggccctccctgtcaccgccctgctgcttccgctggctcttctgctccacgccgctcggcccgacgtggtgatgac |
| Full - nt | 1398 | tcagtcgcctgactcgctggctgtgtcccttggagagcgggccactatcaattgcaagtcatcccagtcgctgctgg |
| | | attccgacgggaaaacctacctcaattggctgcagcaaaaaccgggacagcctccaaagcggctcatcagcctg |
| | | gtgtccaagttggacagcggcgtgccagaccgcttctccggttcgggaagcggtactgatttcacgctgaccatct |
| | | catccctccaagcggaggatgtggcagtctactactgttggcagggcacgcattttccgggcacttttggaggagg |
| | | gaccaaggtcgaaatcaagggaggaggtggctcgggcggaggaggctcgggaggaggaggatcaggaggc |
| | | ggtggaagcgagattcaactggtccagagcggcgcagaagtcaagaagccgggtgaatcgctcagaatctcgtg |
| | | caaaggatcgggattcaacatcgaggactactacattcactgggtcagacaaatgccgggcaaagggctggaat |
| | | ggatggggaggatcgaccccgaaaacgatgaaaccaagtacggaccaatcttccaagggcacgtgaccatttcg |
| | | gcggacacctcaatcaacactgtgtacctccagtggagctcacttaaggccagcgataccgccatgtactattgcg |
| | | ctttccgcggaggggtgtactggggacagggcactactgtgaccgtgtcatccaccactaccccagcaccgagg |
| | | ccacccaccccggctcctaccatcgcctcccagcctctgtccctgcgtccggaggcatgtagacccgcagctggt |
| | | ggggccgtgcatacccggggtcttgacttcgcctgcgatatctacatttgggcccctctggctggtacttgcggggt |
| | | cctgctgctttcactcgtgatcactctttactgtaagcgcggtcggaagaagctgctgtacatctttaagcaaccc |
| | | ttcatgaggcctgtgcagactactcaagaggaggacggctgttcatgccggttcccagaggaggaggaaggcggct |
| | | gcgaactgcgcgtgaaattcagccgcagcgcagatgctccagcctacaagcaggggcagaaccagctctacaa |
| | | cgaactcaatcttggtcggagagaggagtacgacgtgctggacaagcggagaggacgggacccagaaatggg |
| | | cgggaagccgcgcagaaagaatccccaagagggcctgtacaacgagctccaaaaggataagatggcagaagc |
| | | ctatagcgagattggtatgaaaggggaacgcagaagaggcaaaggccacgacggactgtaccagggactcagc |
| | | accgccaccaaggacacctatgacgctcttcacatgcaggccctgccgcctcgg |
| CAR7 | SEQ ID NO: | malpvtalllplalllhaarpdvvmtqspdslavslgeratinckssqslldsdgktylnwlqqkpgqppkrlis |
| Full - aa | 1399 | lvskldsgvpdrfsgsgsgtdftltisslqaedvavyycwqgthfpgtfgggtkveikggggsggggsggggs |
| | | ggggseiqlvqsgaevkkpgeslrisckgsgfniedyyihwvrqmpgkglewmgridpendetkygpif |
| | | qghvtisadtsintvylqwsslkasdtamyycafrggvywgqgttvtvsstttpaprpptpaptiasqplslrpe |
| | | acrpaaggavhtrgldfacdiyiwaplagtcgvlllslvitlyckrgrkkllyifkqpfmrpvqttqeedgcscrfp |
| | | eeeeggcelrvkfsrsadapaykqgqnqlynelnlgrreeydvldkrrgrdpemggkprrknpqeglynelq |
| | | kdkmaeayseigmkgerrrgkghdglyqglstatkdtydalhmqalppr |

CAR 8

| | | |
|---|---|---|
| CAR8 scFv | SEQ ID NO: | dvvmtqsplslpvtlgqpasisckssqslldsdgktylnwlqqrpgqsprrlislvskldsgvpdrfsgsgsgtdf |
| domain | 1400 | tlkisrveaedvgvyycwqgthfpgtfgggtkveikggggsggggsggggsggggseiqlvqsgaevkkpg |
| | | atvkisckgsgfniedyyihwvqqapgkglewmgridpendetkygpifqgrvtitadtstntvymelsslrs |
| | | edtavyycafrggvywgqgttvtvss |
| CAR8 scFv | SEQ ID NO: | gatgtggtcatgacgcagtcaccactgtccctccccgtgacccttggacagccagcgtcgattagctgcaagtcat |
| domain nt | 1401 | cccaatccctgctcgattcggatggaaagacctatctcaactggctgcagcaaagacccggtcagagccctagga |
| | | gactcatctcgttggtgtcaaagctggacagcggagtgccggaccggttttccggttcgggatcggggacggactt |
| | | cactctgaagatttcacgggtggaagctgaggatgtgggagtgtactactgctggcagggaacccatttccctggc |
| | | acttttggcggaggaactaaggtcgaaatcaagggaggaggtggctcgggaggaggcggatcgggcggaggc |
| | | gggagcggcggaggagggtccgaaatccaacttgtccagtcaggagccgaagtgaagaaaccgggagccacc |
| | | gtcaaaatcagctgtaagggatcgggattcaatatcgaggactactacatccactgggtgcagcaagctccgggc |
| | | aaaggactggagtggatggggcgcatcgacccagagaacgacgaaaccaaatacggcccgatcttccaaggg |
| | | cgggtgaccatcaccgcggacacctcaactaacactgtgtacatggagctgagctccctgcgctccgaagatact |
| | | gcagtctactactgcgccttccgcggtggtgtgtactggggacagggcaccactgtgactgtcagctcg |
| CAR8 - | SEQ ID NO: | atggccctccctgtcaccgccctgctgcttccgctggctcttctgctccacgccgctcggcccgatgtggtcatgac |
| Soluble scFv - | 1402 | gcagtcaccactgtccctccccgtgacccttggacagccagcgtcgattagctgcaagtcatcccaatccctgctc |
| nt | | gattcggatggaaagacctatctcaactggctgcagcaaagacccggtcagagccctaggagactcatctcgttg |
| | | gtgtcaaagctggacagcggagtgccggaccggttttccggttcgggatcggggacggacttcactctgaagattt |
| | | cacgggtggaagctgaggatgtgggagtgtactactgctggcagggaacccatttccctggcacttttggcggag |
| | | gaactaaggtcgaaatcaagggaggaggtggctcgggaggaggcggatcgggcggaggcgggagcggcgg |
| | | aggagggtccgaaatccaacttgtccagtcaggagccgaagtgaagaaaccgggagccaccgtcaaaatcagc |
| | | tgtaagggatcgggattcaatatcgaggactactacatccactgggtgcagcaagctccgggcaaaggactggag |
| | | tggatggggcgcatcgacccagagaacgacgaaaccaaatacggcccgatcttccaagggcgggtgaccatca |
| | | ccgcggacacctcaactaacactgtgtacatggagctgagctccctgcgctccgaagatactgcagtctactactg |
| | | cgccttccgcggtggtgtgtactggggacagggcaccactgtgactgtcagctcggggtcccaccatcatcacca |
| | | ccaccatcac |
| CAR8 - | SEQ ID NO: | malpvtalllplalllhaarpdvvmtqsplslpvtlgqpasisckssqslldsdgktylnwlqqrpgqsprrlislv |
| Soluble scFv - | 1403 | skldsgvpdrfsgsgsgtdftlkisrveaedvgvyycwqgthfpgtfgggtkveikggggsggggsggggsg |
| aa | | gggseiqlvqsgaevkkpgatvkisckgsgfniedyyihwvqqapgkglewmgridpendetkygpifqgr |
| | | vtitadtstntvymelsslrsedtavyycafrggvywgqgttvtvssgshhhhhhhh |
| CAR8 - Full - | SEQ ID NO: | atggccctccctgtcaccgccctgctgcttccgctggctcttctgctccacgccgctcggcccgatgtggtcatgac |
| nt | 1404 | gcagtcaccactgtccctccccgtgacccttggacagccagcgtcgattagctgcaagtcatcccaatccctgctc |
| | | gattcggatggaaagacctatctcaactggctgcagcaaagacccggtcagagccctaggagactcatctcgttg |
| | | gtgtcaaagctggacagcggagtgccggaccggttttccggttcgggatcggggacggacttcactctgaagattt |
| | | cacgggtggaagctgaggatgtgggagtgtactactgctggcagggaacccatttccctggcacttttggcggag |
| | | gaactaaggtcgaaatcaagggaggaggtggctcgggaggaggcggatcgggcggaggcgggagcggcgg |
| | | aggagggtccgaaatccaacttgtccagtcaggagccgaagtgaagaaaccgggagccaccgtcaaaatcagc |
| | | tgtaagggatcgggattcaatatcgaggactactacatccactgggtgcagcaagctccgggcaaaggactggag |
| | | tggatggggcgcatcgacccagagaacgacgaaaccaaatacggcccgatcttccaagggcgggtgaccatca |
| | | ccgcggacacctcaactaacactgtgtacatggagctgagctccctgcgctccgaagatactgcagtctactactg |
| | | cgccttccgcggtggtgtgtactggggacagggcaccactgtgactgtcagctcgaccactaccccagcaccga |
| | | ggccacccaccccggctcctaccatcgcctcccagcctctgtccctgcgtccggaggcatgtagacccgcagctg |
| | | gtggggccgtgcatacccggggtcttgacttcgcctgcgatatctacatttgggcccctctggctggtacttgcggg |
| | | gtcctgctgctttcactcgtgatcactctttactgtaagcgcggtcggaagaagctgctgtacatctttaagcaacc |
| | | cttcatgaggcctgtgcagactactcaagaggaggacggctgttcatgccggttcccagaggaggaggaaggcggc |
| | | tgcgaactgcgcgtgaaattcagccgcagcgcagatgctccagcctacaagcaggggcagaaccagctctacaa |
| | | cgaactcaatcttggtcggagagaggagtacgacgtgctggacaagcggagaggacgggacccagaaatggg |
| | | cgggaagccgcgcagaaagaatccccaagagggcctgtacaacgagctccaaaaggataagatggcagaagc |
| | | ctatagcgagattggtatgaaaggggaacgcagaagaggcaaaggccacgacggactgtaccagggactcagc |
| | | accgccaccaaggacacctatgacgctcttcacatgcaggccctgccgcctcgg |
| CAR8 - Full - | SEQ ID NO: | malpvtalllplalllhaarpdvvmtqsplslpvtlgqpasisckssqslldsdgktylnwlqqrpgqsprrlisl |
| aa | 1405 | vskldsgvpdrfsgsgsgtdftlkisrveaedvgvyycwqgthfpgtfgggtkveikggggsggggsggggs |
| | | ggggseiqlvqsgaevkkpgatvkisckgsgfniedyyihwvqqapgkglewmgridpendetkygpif |
| | | qgrvtitadtstntvymelsslrsedtavyycafrggvywgqgttvtvsstapaprpptpaptiasqplslrpeac |
| | | rpaaggavhtrgldfacdiyiwaplagtcgvlllslvitlyckrgrkkllyifkqpfmrpvqttqeedgcscrfpee |
| | | eeggcelrvkfsrsadapaykqgqnqlynelnlgrreeydvldlargrdpemggkprrknpqeglynelqkd |
| | | kmaeayseigmkgerrrgkghdglyqglstatkdtydalhmqalppr |

CAR 9 Mouse anti-EGFRvIII clone 3C10

| | | |
|---|---|---|
| CAR9 scFv | SEQ ID NO: | eiqlqqsgaelvkpgasvklsctgsgfniedyyihwvkqrteqglewigridpendetkygpifqgratitadts |
| domain | 1406 | sntvylqlssltsedtavyycafrggvywgpgaltvssggggsggggsggggshmdvvmtqspltlsvaigq |
| | | sasisckssqslldsdgktylnwllqrpgqspkrlislvskldsgvpdrftgsgsgtdftlrisrveaedlgiyycw |
| | | qgthfpgtfgggtkleik |
| CAR9 scFv | SEQ ID NO: | gagatccagctccaacagagcggagccgaactggtcaaaccgggagcgtcggtgaagttgtcatgcactggatc |
| domain nt | 1407 | gggcttcaacatcgaggattactacatccactgggtcaagcaacgcaccgagcaggggctggaatggatcggac |
| | | ggatcgaccccgaaaacgatgaaaccaagtacgggcctatcttccaaggacgggccaccattacggctgacacg |
| | | tcaagcaataccgtctacctccagctttccagcctgacctccgaggacactgccgtgtactactgcgccttcagagg |
| | | aggcgtgtactggggaccaggaaccactttgaccgtgtccagcggaggcggtggatcaggaggaggaggctca |
| | | ggcggtggcggctcgcacatggacgtggtcatgactcagtccccgctgaccctgtcggtggcaattggacagag |
| | | cgcatccatctcgtgcaagagctcacagtcgctgctggattccgacggaaagacttatctgaactggctgctccaa |
| | | agaccagggcaatcaccgaaacgccttatctccctggtgtcgaaactcgactcgggtgtgccggatcggtttaccg |
| | | gtagcgggtccggcacggacttcactctccgcatttcgagggtggaagcggaggatctcgggatctactactgttg |
| | | gcagggaacccacttccctgggacttttggaggcggaactaagctggaaatcaag |
| CAR9 - | SEQ ID NO: | atggccctccctgtcaccgccctgctgcttccgctggctcttctgctccacgccgctcggcccgagatccagctcca |
| Soluble scFv - | 1408 | acagagcggagccgaactggtcaaaccgggagcgtcggtgaagttgtcatgcactggatcgggcttcaacatcg |
| nt | | aggattactacatccactgggtcaagcaacgcaccgagcaggggctggaatggatcggacggatcgaccccga |
| | | aaacgatgaaaccaagtacgggcctatcttccaaggacgggccaccattacggctgacacgtcaagcaataccgt |
| | | ctacctccagctttccagcctgacctccgaggacactgccgtgtactactgcgccttcagaggaggcgtgtactgg |
| | | ggaccaggaaccactttgaccgtgtccagcggaggcggtggatcaggaggaggaggctcaggcggtggcggc |
| | | tcgcacatggacgtggtcatgactcagtccccgctgaccctgtcggtggcaattggacagagcgcatccatctcgt |
| | | gcaagagctcacagtcgctgctggattccgacggaaagacttatctgaactggctgctccaaagaccagggcaat |
| | | caccgaaacgccttatctccctggtgtcgaaactcgactcgggtgtgccggatcggtttaccggtagcgggtccgg |
| | | cacggacttcactctccgcatttcgagggtggaagcggaggatctcgggatctactactgttggcagggaaccca |
| | | cttccctgggacttttggaggcggaactaagctggaaatcaagggtagccatcaccatcaccaccaccatcat |
| CAR9 - | SEQ ID NO: | malpvtalllplalllhaarpeiqlqqsgaelvkpgasvklsctgsgfniedyyihwvkqrteqglewigridpe |
| Soluble scFv - | 1409 | ndetkygpifqgratitadtssntvylqlssltsedtavyycafrggvywgpgttltvssggggsggggsggggs |
| aa | | hmdvvmtqspltlsvaigqsasisckssqslldsdgktylnwllqrpgqspkrlislvskldsgvpdrftgsgsgt |
| | | dftlrisrveaedlgiyycwqgthfpgtfgggtkleikgshhhhhhhh |
| CAR9 - Full - | SEQ ID NO: | atggccctccctgtcaccgccctgctgcttccgctggctcttctgctccacgccgctcggcccgagatccagctcca |
| nt | 1410 | acagagcggagccgaactggtcaaaccgggagcgtcggtgaagttgtcatgcactggatcgggcttcaacatcg |
| | | aggattactacatccactgggtcaagcaacgcaccgagcaggggctggaatggatcggacggatcgaccccga |
| | | aaacgatgaaaccaagtacgggcctatcttccaaggacgggccaccattacggctgacacgtcaagcaataccgt |
| | | ctacctccagctttccagcctgacctccgaggacactgccgtgtactactgcgccttcagaggaggcgtgtactgg |
| | | ggaccaggaaccactttgaccgtgtccagcggaggcggtggatcaggaggaggaggctcaggcggtggcggc |
| | | tcgcacatggacgtggtcatgactcagtccccgctgaccctgtcggtggcaattggacagagcgcatccatctcgt |
| | | gcaagagctcacagtcgctgctggattccgacggaaagacttatctgaactggctgctccaaagaccagggcaat |
| | | caccgaaacgccttatctccctggtgtcgaaactcgactcgggtgtgccggatcggtttaccggtagcgggtccgg |
| | | cacggacttcactctccgcatttcgagggtggaagcggaggatctcgggatctactactgttggcagggaaccca |
| | | cttccctgggacttttggaggcggaactaagctggaaatcaagaccactaccccagcaccgaggccacccaccc |
| | | cggctcctaccatcgcctcccagcctctgtccctgcgtccggaggcatgtagacccgcagctggtggggccgtgc |
| | | atacccggggtcttgacttcgcctgcgatatctacatttgggcccctctggctggtacttgcggggtcctgctgc |
| | | tttcactcgtgatcactctttactgtaagcgcggtcggaagaagctgctgtacatctttaagcaacccttcatga |
| | | ggcctgtgcagactactcaagaggaggacggctgttcatgccggttcccagaggaggaggaaggcggctgcgaac |
| | | tgcgcgtgaaattcagccgcagcgcagatgctccagcctacaagcaggggcagaaccagctctacaacgaactca |
| | | atcttggtcggagagaggagtacgacgtgctggacaagcggagaggacgggacccagaaatgggcgggaagccgc |
| | | gcagaaagaatccccaagagggcctgtacaacgagctccaaaaggataagatggcagaagcctatagcgagatt |
| | | ggtatgaaaggggaacgcagaagaggcaaaggccacgacggactgtaccagggactcagcaccgccaccaa |
| | | ggacacctatgacgctcttcacatgcaggccctgccgcctcgg |
| CAR9 - Full - | SEQ ID NO: | malpvtalllplalllhaarpeiqlqqsgaelvkpgasvklsctgsgfniedyyihwvkqrteqglewigridpe |
| aa | 1411 | ndetkyrgpifqgratitadtssntvylqlssltsedtavyycafrggvywgpgttltvssggggsggggsgggg |
| | | shmdvvmtqspltlsvaigqsasisckssqslldsdgktylnwllqrpgqspkrlislvskldsgvpdrftgsg |
| | | sgtdftlrisrveaedlgiyycwqgthfpgtfgggtkleiktttpaprpptpaptiasqplslrpeacrpaaggavh |
| | | trgldfacdiyiwaplagtcgvlllslvitlyckrgrkkllyifkqpfmrpvqttqeedgcscrfpeeeeggcelrv |
| | | kfsrsadapaykqgqnqlynelnlgrreeydvldkrrgrdpemggkprrknpqeglynelqkdkmaeayse |
| | | igmkgerrrgkghdglyqglstatkdtydalhmqalppr |

CAR10 Anti-EGFRvIII clone 139

| | | |
|---|---|---|
| CAR10 scFv | SEQ ID NO: | diqmtqspsslsasvgdrvtitcrasqgirnnlawyqqkpgkapkrliyaasnlqsgvpsrftgsgsgteftlivs |
| domain | 1412 | slqpedfatyyclqhhsypltsgggtkveikrtgstsgsgkpgsgegsevqvlesggglvqpggslrlscaasgft |
| | | fssyamswvrqapgkglewvsaisgsggstnyadsvkgrftisrdnskntlylqmnslraedtavyycagssg |
| | | wseywgqgtivtvss |
| CAR9 scFv | SEQ ID NO: | gatatccaaatgactcagagcccttcatccctgagcgccagcgtcggagacagggtgaccatcacgtgccgggc |
| domain nt | 1413 | atcccaaggcattagaaataacttggcgtggtatcagcaaaaaccaggaaaggccccgaagcgcctgatctacgc |
| | | ggcctccaaccttcagtcaggagtgccctcgcgcttcaccgggagcggtagcggaactgagtttacccttatcgtg |
| | | tcgtccctgcagccagaggacttcgcgacctactactgcctccagcatcactcgtacccgttgacttcgggaggcg |
| | | gaaccaaggtcgaaatcaaacgcactggctcgacgtcagggtccggtaaaccgggatcgggagaaggatcgga |
| | | agtccaagtgctggagagcggaggcggactcgtgcaacctggcgggtcgctgcggctcagctgtgccgcgtcg |
| | | ggttttactttcagctcgtacgctatgtcatgggtgcggcaggctccgggaaaggggctggaatgggtgtccgctat |
| | | ttccggctcgggtggaagcaccaattacgccgactccgtgaagggacgcttcaccatctcacgggataactccaa |
| | | gaatactctgtacctccagatgaactcgctgagagccgaggacaccgcagtgtactactgcgcagggtcaagcg |
| | | gctggtccgaatactggggacagggcaccctcgtcactgtcagctcc |
| CAR10 - | SEQ ID NO: | atggccctccctgtcaccgccctgctgcttccgctggctcttctgctccacgccgctcggcccgatatccaaatgac |
| Soluble scFv - | 1414 | tcagagcccttcatccctgagcgccagcgtcggagacagggtgaccatcacgtgccgggcatcccaaggcatta |
| nt | | gaaataacttggcgtggtatcagcaaaaaccaggaaaggccccgaagcgcctgatctacgcggcctccaaccttc |
| | | agtcaggagtgccctcgcgcttcaccgggagcggtagcggaactgagtttacccttatcgtgtcgtccctgcagcc |
| | | agaggacttcgcgacctactactgcctccagcatcactcgtacccgttgacttcgggaggcggaaccaaggtcga |
| | | aatcaaacgcactggctcgacgtcagggtccggtaaaccgggatcgggagaaggatcggaagtccaagtgctg |
| | | gagagcggaggcggactcgtgcaacctggcgggtcgctgcggctcagctgtgccgcgtcgggttttactttcagc |
| | | tcgtacgctatgtcatgggtgcggcaggctccgggaaaggggctggaatgggtgtccgctatttccggctcgggt |
| | | ggaagcaccaattacgccgactccgtgaagggacgcttcaccatctcacgggataactccaagaatactctgtacc |
| | | tccagatgaactcgctgagagccgaggacaccgcagtgtactactgcgcagggtcaagcggctggtccgaatac |
| | | tggggacagggcaccctcgtcactgtcagctcccatcaccatcaccaccaccatcac |
| CAR10 - | SEQ ID NO: | malpvtalllplalllhaarpdiqmtqspsslsasvgdrvtitcrasqgirnnlawyqqkpgkapkrliyaasnlq |
| Soluble scFv - | 1415 | sgvpsrftgsgsgteftlivsslqpedfatyyclqhhsypltsgggtkveikrtgstsgsgkpgsgegsevqvlesg |
| aa | | gglvqpggslrlscaasgftfssyamswvrqapgkglewvsaisgsggstnyadsvkgrftisrdnskntlylq |
| | | mnslraedtavyycagssgwseywgqgtlvtvsshhhhhhhh |
| CAR10 Full - | SEQ ID NO: | atggccctccctgtcaccgccctgctgcttccgctggctcttctgctccacgccgctcggcccgatatccaaatgac |
| nt | 1416 | tcagagcccttcatccctgagcgccagcgtcggagacagggtgaccatcacgtgccgggcatcccaaggcatta |
| | | gaaataacttggcgtggtatcagcaaaaaccaggaaaggccccgaagcgcctgatctacgcggcctccaaccttc |
| | | agtcaggagtgccctcgcgcttcaccgggagcggtagcggaactgagtttacccttatcgtgtcgtccctgcagcc |
| | | agaggacttcgcgacctactactgcctccagcatcactcgtacccgttgacttcgggaggcggaaccaaggtcga |
| | | aatcaaacgcactggctcgacgtcagggtccggtaaaccgggatcgggagaaggatcggaagtccaagtgctg |
| | | gagagcggaggcggactcgtgcaacctggcgggtcgctgcggctcagctgtgccgcgtcgggttttactttcagc |
| | | tcgtacgctatgtcatgggtgcggcaggctccgggaaaggggctggaatgggtgtccgctatttccggctcgggt |
| | | ggaagcaccaattacgccgactccgtgaagggacgcttcaccatctcacgggataactccaagaatactctgtacc |
| | | tccagatgaactcgctgagagccgaggacaccgcagtgtactactgcgcagggtcaagcggctggtccgaatac |
| | | tggggacagggcaccctcgtcactgtcagctccaccactaccccagcaccgaggccacccaccccggctcctac |
| | | catcgcctcccagcctctgtccctgcgtccggaggcatgtagacccgcagctggtggggccgtgcatacccggg |
| | | gtcttgacttcgcctgcgatatctacatttgggcccctctggctggtacttgcggggtcctgctgctttcactc |
| | | gtgatcactctttactgtaagcgcggtcggaagaagctgctgtacatctttaagcaacccttcatgaggcctgt |
| | | gcagactactcaagaggaggacggctgttcatgccggttcccagaggaggaggaaggcggctgcgaactgcgcg |
| | | tgaaattcagccgcagcgcagatgctccagcctacaagcaggggcagaaccagctctacaacgaactcaatctt |
| | | ggtcggagagaggagtacgacgtgctggacaagcggagaggacgggacccagaaatgggcgggaagccgcgcag |
| | | aaagaatccccaagagggcctgtacaacgagctccaaaaggataagatggcagaagcctatagcgagattggta |
| | | tgaaaggggaacgcagaagaggcaaaggccacgacggactgtaccagggactcagcaccgccaccaaggacaccta |
| | | tgacgctcttcacatgcaggccctgccgcctcgg |
| CAR10 Full - | SEQ ID NO: | malpvtalllplalllhaarpdiqmtqspsslsasvgdrvtitcrasqgirnnlawyqqkpgkapkrliyaasnlq |
| aa | 1417 | sgvpsrftgsgsgteftlivsslqpedfatyyclqhhsypltsgggtkveikrtgstsgsgkpgsgegsevqvlesg |
| | | gglvqpggslrlscaasgftfssyamswvrqapgkglewvsaisgsggstnyadsvkgrftisrdnskntlylq |
| | | mnslraedtavyycagssgwseywgqgtivtvsstapaprpptpaptiasqplslrpeacrpaaggavhtrgld |
| | | facdiyiwaplagtcgvlllslvitlyckrgrkkllyiflawfmrpvqttqeedgcscrfpeeeeggcelrvkfsrs |
| | | adapaykqgqnqlynelnlgrreeydvldlargrdpemggkprrknpqeglynelqkdkmaeayseigmk |
| | | gerrrgkghdglyqglstatkdtydalhmqalppr |

### Mesothelin CAR and Mesothelin-Binding Sequences

[0284] In some embodiments, the CAR IL-15R/IL-15-expressing cell described herein is a mesothelin CAR-expressing cell (e.g., a cell expressing a CAR that binds to human mesothelin). Exemplary mesothelin CARs can include sequences disclosed in WO2015090230 and WO2017112741, e.g., Tables 2, 3, 4, and 5 of WO2017112741, incorporated herein by reference.

[0285] Exemplary mesothelin-binding sequences or mesothelin CAR sequences may comprise a CDR, a variable region, an scFv, or a full-length CAR sequence of a sequence disclosed in Table 19 (or a sequence at least about 85%, 90%, 95%, 99% or more identical thereto, and/or having one, two, three or more substitutions, insertions, deletions, or modifications).

TABLE 19
Amino Acid Sequences of Human scFvs and CARs that bind to mesothelin
(bold underline is the leader sequence and grey box is a linker sequence).
In the case of the scFvs, the remaining amino acids are the heavy chain
variable region and light chain variable regions, with each of the HC CDRs
(HC CDR1, HC CDR2, HC CDR3) and LC CDRs (LC CDR1, LC CDR2, LCCDR3) underlined.
In the case of the CARs, the further remaining amino acids
are the remaining amino acids of the CARs.

| SEQ ID | | |
|---|---|---|
| NO: | Description | Amino Acid Sequence |
| SEQ ID | M1 (ScFv | QVQLQQSGAEVKKPGASVKVSCKASGYTFTGYYMHWVRQ |
| NO: | domain) | APGQGLEWMGRINPNSGGTNYAQKFQGRVTMTRDTSISTAYMELSRLRSEDTAVYYCARG |
| 1418 | | RYYGMDVWGQGTMVTVSSGGGGSGGGGSGGGGSGGGGSEIVLTQSPATLSLSPGERATIS |
| | | CRASQSVSSNFAWYQQRPGQAPRLLIYDASNRATGIPPRFSGSGSGTDFTLTISSLEPED |
| | | FAAYYCHQRSNWLYTFGQGTKVDIK |
| SEQ ID | M1 (full) | MALPVTALLLPLALLLHAARPQVQLQQSGAEVKKPGASVKVSCKASGYTFTGYYMHWVRQ |
| NO: | >ZA53- | APGQGLEWMGRINPNSGGTNYAQKFQGRVTMTRDTSISTAYMELSRLRSEDTAVYYCARG |
| 1419 | 27BC | RYYGMDVWGQGTMVTVSSGGGGSGGGGSGGGGSGGGGSEIVLTQSPATLSLSPGERATIS |
| | (M1 | CRASQSVSSNFAWYQQRPGQAPRLLIYDASNRATGIPPRFSGSGSGTDFTLTISSLEPED |
| | ZA53- | FAAYYCHQRSNWLYTFGQGTKVDIKTTTPAPRPPTPAPTIASQPLSLRPEACRPAAGGAV |
| | 27BC | HTRGLDFACDIYIWAPLAGTCGVLLLSLVITLYCKRGRKKLLYIFKQPFMRPVQTTQEED |
| | R001- | GCSCRFPEEEEGGCELRVKFSRSADAPAYKQGQNQLYNELNLGRREEYDVLDKRRGRDPE |
| | A11 | MGGKPRRKNPQEGLYNELQKDKMAEAYSEIGMKGERRRGKGHDGLYQGLSTATKDTYDAL |
| | 126161) | HMQALPPR |
| SEQ ID | M2 (ScFv | QVQLVQSGAEVKKPGASVKVSCKASGYTFTGYYMHWVRQ |
| NO: | domain) | APGQGLEWMGWINPNSGGTNYAQKFQGRVTMTRDTSISTAYMELSRLRSDDTAVYYCARD |
| 1420 | | LRRTVVTPRAYYGMDVWGQGTTVTVSSGGGGSGGGGSGGGGSGGGGSDIQLTQSPSTLSA |
| | | SVGDRVTITCQASQDISNSLNWYQQKAGKAPKLLIYDASTLETGVPSRFSGSGSGTDFSF |
| | | TISSLQPEDIATYYCQQHDNLPLTFGQGTKVEIK |
| SEQ ID | M2 (full) | MALPVTALLLPLALLLHAARPQVQLVQSGAEVKKPGASVKVSCKASGYTFTGYYMHWVRQ |
| NO: | >FA56- | APGQGLEWMGWINPNSGGTNYAQKFQGRVTMTRDTSISTAYMELSRLRSDDTAVYYCARD |
| 1421 | 26RC | LRRTVVTPRAYYGMDVWGQGTTVTVSSGGGGSGGGGSGGGGSGGGGSDIQLTQSPSTLSA |
| | (M2 | SVGDRVTITCQASQDISNSLNWYQQKAGKAPKLLIYDASTLETGVPSRFSGSGSGTDFSF |
| | FA56- | TISSLQPEDIATYYCQQHDNLPLTFGQGTKVEIKTTTPAPRPPTPAPTIASQPLSLRPEA |
| | 26RC | CRPAAGGAVHTRGLDFACDIYIWAPLAGTCGVLLLSLVITLYCKRGRKKLLYIFKQPFMR |
| | R001- | PVQTTQEEDGCSCRFPEEEEGGCELRVKFSRSADAPAYKQGQNQLYNELNLGRREEYDVL |
| | A10 | DKRRGRDPEMGGKPRRKNPQEGLYNELQKDKMAEAYSEIGMKGERRRGKGHDGLYQGLST |
| | 126162) | ATKDTYDALHMQALPPR |
| SEQ ID | M3 (ScFv | QVQLVQSGAEVKKPGAPVKVSCKASGYTFTGYYMHWVRQ |
| NO: | domain) | APGQGLEWMGWINPNSGGTNYAQKFQGRVTMTRDTSISTAYMELSRLRSDDTAVYYCARG |
| 1422 | | EWDGSYYYDYWGQGTLVTVSSGGGGSGGGGSGGGGSGGGGSDIVLTQTPSSLSASVGDRV |
| | | TITCRASQSINTYLNWYQHKPGKAPKLLIYAASSLQSGVPSRFSGSGSGTDFTLTISSLQ |
| | | PEDFATYYCQQSFSPLTFGGGTKLEIK |
| SEQ ID | M3 | MALPVTALLLPLALLLHAARPQVQLVQSGAEVKKPGAPVKVSCKASGYTFTGYYMHWVRQ |
| NO: | >VA58- | APGQGLEWMGWINPNSGGTNYAQKFQGRVTMTRDTSISTAYMELSRLRSDDTAVYYCARG |
| 1423 | 21LC | EWDGSYYYDYWGQGTLVTVSSGGGGSGGGGSGGGGSGGGGSDIVLTQTPSSLSASVGDRV |
| | (M3 | TITCRASQSINTYLNWYQHKPGKAPKLLIYAASSLQSGVPSRFSGSGSGTDFTLTISSLQ |
| | VA58- | PEDFATYYCQQSFSPLTFGGGTKLEIKTTTPAPRPPTPAPTIASQPLSLRPEACRPAAGG |
| | 21LC | AVHTRGLDFACDIYIWAPLAGTCGVLLLSLVITLYCKRGRKKLLYIFKQPFMRPVQTTQE |
| | R001-A1 | EDGCSCRFPEEEEGGCELRVKFSRSADAPAYKQGQNQLYNELNLGRREEYDVLDKRRGRD |
| | 126163) | PEMGGKPRRKNPQEGLYNELQKDKMAEAYSEIGMKGERRRGKGHDGLYQGLSTATKDTYD |
| | | ALHMQALPPR |
| SEQ ID | M4 (ScFv | QVQLVESGGGLVQPGGSLRLSCAASGFTFSSYWMHWVRQ |
| NO: | domain) | VPGKGLVWVSRINTDGSTTTYADSVEGRFTISRDNAKNTLYLQMNSLRDDDTAVYYCVGG |
| 1424 | | HWAVWGQGTTVTVSSGGGGSGGGGSGGGGSGGGGSDIQMTQSPSTLSASVGDRVTITCRA |
| | | SQSISDRLAWYQQKPGKAPKLLIYKASSLESGVPSRFSGSGSGTEFTLTISSLQPDDFAV |
| | | YYCQQYGHLPMYTFGQGTKVEIK |
| SEQ ID | M4 | MALPVTALLLPLALLLHAARPQVQLVESGGGLVQPGGSLRLSCAASGFTFSSYWMHWVRQ |
| NO: | >DP37- | VPGKGLVWVSRINTDGSTTTYADSVEGRFTISRDNAKNTLYLQMNSLRDDDTAVYYCVGG |
| 1425 | 07IC | HWAVWGQGTTVTVSSGGGGSGGGGSGGGGSGGGGSDIQMTQSPSTLSASVGDRVTITCRA |
| | (M4 | SQSISDRLAWYQQKPGKAPKLLIYKASSLESGVPSRFSGSGSGTEFTLTISSLQPDDFAV |
| | DP37- | YYCQQYGHLPMYTFGQGTKVEIKTTTPAPRPPTPAPTIASQPLSLRPEACRPAAGGAVHT |
| | 07IC | RGLDFACDIYIWAPLAGTCGVLLLSLVITLYCKRGRKKLLYIFKQPFMRPVQTTQEEDGC |
| | R001-C6 | SCRFPEEEEGGCELRVKFSRSADAPAYKQGQNQLYNELNLGRREEYDVLDKRRGRDPEMG |
| | 126164) | GKPRRKNPQEGLYNELQKDKMAEAYSEIGMKGERRRGKGHDGLYQGLSTATKDTYDALHM |
| | | QALPPR |
| SEQ ID | M5 (ScFv | QVQLVQSGAEVEKPGASVKVSCKASGYTFTDYYMHWVRQ |
| NO: | domain) | APGQGLEWMGWINPNSGGTNYAQKFQGRVTMTRDTSISTAYMELSRLRSDDTAVYYCASG |
| 1426 | | WDFDYWGQGTLVTVSSGGGGSGGGGSGGGGSGGGGSDIVMTQSPSSLSASVGDRVTITCR |
| | | ASQSIRYYLSWYQQKPGKAPKLLIYTASILQNGVPSRFSGSGSGTDFTLTISSLQPEDFA |
| | | TYYCLQTYTTPDFGPGTKVEIK |
| SEQ ID | M5 | MALPVTALLLPLALLLHAARPQVQLVQSGAEVEKPGASVKVSCKASGYTFTDYYMHWVRQ |
| NO: | >XP31- | APGQGLEWMGWINPNSGGTNYAQKFQGRVTMTRDTSISTAYMELSRLRSDDTAVYYCASG |
| 1427 | 20LC | WDFDYWGQGTLVTVSSGGGGSGGGGSGGGGSGGGGSDIVMTQSPSSLSASVGDRVTITCR |
| | (M5 | ASQSIRYYLSWYQQKPGKAPKLLIYTASILQNGVPSRFSGSGSGTDFTLTISSLQPEDFA |
| | XP31- | TYYCLQTYTTPDFGPGTKVEIKTTTPAPRPPTPAPTIASQPLSLRPEACRPAAGGAVHTR |
| | 20LC | GLDFACDIYIWAPLAGTCGVLLLSLVITLYCKRGRKKLLYIFKQPFMRPVQTTQEEDGCS |
| | R001-B4 | CRFPEEEEGGCELRVKFSRSADAPAYKQGQNQLYNELNLGRREEYDVLDKRRGRDPEMGG |
| | 126165) | KPRRKNPQEGLYNELQKDKMAEAYSEIGMKGERRRGKGHDGLYQGLSTATKDTYDALHMQ |
| | | ALPPR |
| SEQ ID | M6 (ScFv | QVQLVQSGAEVKKPGASVKVSCKASGYTFTSYYMHWVRQ |
| NO: | domain) | APGQGLEWMGIINPSGGSTSYAQKFQGRVTMTRDTSTSTVYMELSSLRSEDTAVYYCARY |
| 1428 | | RLIAVAGDYYYYGMDVWGQGTMVTVSSGGGGSGGGGSGGGGSGGGGSDIQMTQSPSSVSA |
| | | SVGDRVTITCRASQGVGRWLAWYQQKPGTAPKLLIYAASTLQSGVPSRFSGSGSGTDFTL |
| | | TINNLQPEDFATYYCQQANSFPLTFGGGTRLEIK |
| SEQ ID | M6 | MALPVTALLLPLALLLHAARPQVQLVQSGAEVKKPGASVKVSCKASGYTFTSYYMHWVRQ |
| NO: | >FE10- | APGQGLEWMGIINPSGGSTSYAQKFQGRVTMTRDTSTSTVYMELSSLRSEDTAVYYCARY |
| 1429 | 06ID | RLIAVAGDYYYYGMDVWGQGTMVTVSSGGGGSGGGGSGGGGSGGGGSDIQMTQSPSSVSA |
| | (M6 | SVGDRVTITCRASQGVGRWLAWYQQKPGTAPKLLIYAASTLQSGVPSRFSGSGSGTDFTL |
| | 46FE10- | TINNLQPEDFATYYCQQANSFPLTFGGGTRLEIKTTTPAPRPPTPAPTIASQPLSLRPEA |
| | 06ID | CRPAAGGAVHTRGLDFACDIYIWAPLAGTCGVLLLSLVITLYCKRGRKKLLYIFKQPFMR |
| | R001-A4 | PVQTTQEEDGCSCRFPEEEEGGCELRVKFSRSADAPAYKQGQNQLYNELNLGRREEYDVL |
| | 126166) | DKRRGRDPEMGGKPRRKNPQEGLYNELQKDKMAEAYSEIGMKGERRRGKGHDGLYQGLST |
| | | ATKDTYDALHMQALPPR |
| SEQ ID | M7 (ScFv | QVQLVQSGGGVVQPGRSLRLSCAASGFTFSSYAMHWVRQ |
| NO: | domain) | APGKGLEWVAVISYDGSNKYYADSVKGRFTISRDNSKNTLYLQMNSLRAEDTAVYYCARW |
| 1430 | | KVSSSSPAFDYWGQGTLVTVSSGGGGSGGGGSGGGGSGGGGSEIVLTQSPATLSLSPGER |
| | | AILSCRASQSVYTKYLGWYQQKPGQAPRLLIYDASTRATGIPDRFSGSGSGTDFTLTINR |
| | | LEPEDFAVYYCQHYGGSPLITFGQGTRLEIK |
| SEQ ID | M7 | MALPVTALLLPLALLLHAARPQVQLVQSGGGVVQPGRSLRLSCAASGFTFSSYAMHWVRQ |
| NO: | >VE12- | APGKGLEWVAVISYDGSNKYYADSVKGRFTISRDNSKNTLYLQMNSLRAEDTAVYYCARW |
| 1431 | 01CD | KVSSSSPAFDYWGQGTLVTVSSGGGGSGGGGSGGGGSGGGGSEIVLTQSPATLSLSPGER |
| | (M7 | AILSCRASQSVYTKYLGWYQQKPGQAPRLLIYDASTRATGIPDRFSGSGSGTDFTLTINR |
| | VE12- | LEPEDFAVYYCQHYGGSPLITFGQGTRLEIKTTTPAPRPPTPAPTIASQPLSLRPEACRP |
| | 01CD | AAGGAVHTRGLDFACDIYIWAPLAGTCGVLLLSLVITLYCKRGRKKLLYIFKQPFMRPVQ |
| | R001-A5 | TTQEEDGCSCRFPEEEEGGCELRVKFSRSADAPAYKQGQNQLYNELNLGRREEYDVLDKR |
| | 126167) | RGRDPEMGGKPRRKNPQEGLYNELQKDKMAEAYSEIGMKGERRRGKGHDGLYQGLSTATK |
| | | DTYDALHMQALPPR |
| SEQ ID | M8 (ScFv | QVQLQQSGAEVKKPGASVKVSCKTSGYPFTGYSLHWVRQ |
| NO: | domain) | APGQGLEWMGWINPNSGGTNYAQKFQGRVTMTRDTSISTAYMELSRLRSDDTAVYYCARD |
| 1432 | | HYGGNSLFYWGQGTLVTVSSGGGGSGGGGSGGGGSGGGGSDIQLTQSPSSISASVGDTVS |
| | | ITCRASQDSGTWLAWYQQKPGKAPNLLMYDASTLEDGVPSRFSGSASGTEFTLTVNRLQP |
| | | EDSATYYCQQYNSYPLTFGGGTKVDIK |
| SEQ ID | M8 | MALPVTALLLPLALLLHAARPQVQLQQSGAEVKKPGASVKVSCKTSGYPFTGYSLHWVRQ |
| NO: | >LE13- | APGQGLEWMGWINPNSGGTNYAQKFQGRVTMTRDTSISTAYMELSRLRSDDTAVYYCARD |
| 1433 | 05XD | HYGGNSLFYWGQGTLVTVSSGGGGSGGGGSGGGGSGGGGSDIQLTQSPSSISASVGDTVS |
| | (M8 | ITCRASQDSGTWLAWYQQKPGKAPNLLMYDASTLEDGVPSRFSGSASGTEFTLTVNRLQP |
| | LE13- | EDSATYYCQQYNSYPLTFGGGTKVDIKTTTPAPRPPTPAPTIASQPLSLRPEACRPAAGG |
| | 05XD | AVHTRGLDFACDIYIWAPLAGTCGVLLLSLVITLYCKRGRKKLLYIFKQPFMRPVQTTQE |
| | R001-E5 | EDGCSCRFPEEEEGGCELRVKFSRSADAPAYKQGQNQLYNELNLGRREEYDVLDKRRGRD |
| | 126168) | PEMGGKPRRKNPQEGLYNELQKDKMAEAYSEIGMKGERRRGKGHDGLYQGLSTATKDTYD |
| | | ALHMQALPPR |
| SEQ ID | M9 (ScFv | QVQLVQSGAEVKKPGASVEVSCKASGYTFTSYYMHWVRQ |
| NO: | domain) | APGQGLEWMGIINPSGGSTGYAQKFQGRVTMTRDTSTSTVHMELSSLRSEDTAVYYCARG |
| 1434 | | GYSSSSDAFDIWGQGTMVTVSSGGGGSGGGGSGGGGSGGGGSDIQMTQSPPSLSASVGDR |
| | | VTITCRASQDISSALAWYQQKPGTPPKLLIYDASSLESGVPSRFSGSGSGTDFTLTISSL |
| | | QPEDFATYYCQQFSSYPLTFGGGTRLEIK |
| SEQ ID | M9 | MALPVTALLLPLALLLHAARPQVQLVQSGAEVKKPGASVEVSCKASGYTFTSYYMHWVRQ |
| NO: | >BE15- | APGQGLEWMGIINPSGGSTGYAQKFQGRVTMTRDTSTSTVHMELSSLRSEDTAVYYCARG |
| 1435 | 00SD | GYSSSSDAFDIWGQGTMVTVSSGGGGSGGGGSGGGGSGGGGSDIQMTQSPPSLSASVGDR |
| | (M9 | VTITCRASQDISSALAWYQQKPGTPPKLLIYDASSLESGVPSRFSGSGSGTDFTLTISSL |
| | BE15- | QPEDFATYYCQQFSSYPLTFGGGTRLEIKTTTPAPRPPTPAPTIASQPLSLRPEACRPAA |
| | 00SD | GGAVHTRGLDFACDIYIWAPLAGTCGVLLLSLVITLYCKRGRKKLLYIFKQPFMRPVQTT |
| | R001-A3 | QEEDGCSCRFPEEEEGGCELRVKFSRSADAPAYKQGQNQLYNELNLGRREEYDVLDKRRG |
| | 126169) | RDPEMGGKPRRKNPQEGLYNELQKDKMAEAYSEIGMKGERRRGKGHDGLYQGLSTATKDT |
| | | YDALHMQALPPR |
| SEQ ID | M10 | QVQLVQSGAEVKKPGASVKVSCKASGYTFTSYGISWVRQ |
| NO: | (ScFv | APGQGLEWMGWISAYNGNTNYAQKLQGRVTMTTDTSTSTAYMELRSLRSDDTAVYYCARV |
| 1436 | domain) | AGGIYYYYGMDVWGQGTTITVSSGGGGSGGGGSGGGGSGGGGSDIVMTQTPDSLAVSLGE |
| | | RATISCKSSHSVLYNRNNKNYLAWYQQKPGQPPKLLFYWASTRKSGVPDRFSGSGSGTDF |
| | | TLTISSLQPEDFATYFCQQTQTFPLTFGQGTRLEIN |
| SEQ ID | M10 | MALPVTALLLPLALLLHAARPQVQLVQSGAEVKKPGASVKVSCKASGYTFTSYGISWVRQ |
| NO: | >RE16- | APGQGLEWMGWISAYNGNTNYAQKLQGRVTMTTDTSTSTAYMELRSLRSDDTAVYYCARV |
| 1437 | 05MD | AGGIYYYYGMDVWGQGTTITVSSGGGGSGGGGSGGGGSGGGGSDIVMTQTPDSLAVSLGE |
| | (M10 | RATISCKSSHSVLYNRNNKNYLAWYQQKPGQPPKLLFYWASTRKSGVPDRFSGSGSGTDF |
| | RE16- | TLTISSLQPEDFATYFCQQTQTFPLTFGQGTRLEINTTTPAPRPPTPAPTIASQPLSLRP |
| | 05MD | EACRPAAGGAVHTRGLDFACDIYIWAPLAGTCGVLLLSLVITLYCKRGRKKLLYIFKQPF |
| | R001- | MRPVQTTQEEDGCSCRFPEEEEGGCELRVKFSRSADAPAYKQGQNQLYNELNLGRREEYD |
| | D10 | VLDKRRGRDPEMGGKPRRKNPQEGLYNELQKDKMAEAYSEIGMKGERRRGKGHDGLYQGL |
| | 126170) | STATKDTYDALHMQALPPR |
| SEQ ID | M11 | QVQLQQSGAEVKKPGASVKVSCKASGYTFTGYYMHWVRQ |
| NO: | (ScFv | APGQGLEWMGWINPNSGGTNYAQNFQGRVTMTRDTSISTAYMELRRLRSDDTAVYYCASG |
| 1438 | domain) | WDFDYWGQGTLVTVSSGGGGSGGGGSGGGGSGGGGSDIRMTQSPSSLSASVGDRVTITCR |
| | | ASQSIRYYLSWYQQKPGKAPKLLIYTASILQNGVPSRFSGSGSGTDFTLTISSLQPEDFA |
| | | TYYCLQTYTTPDFGPGTKVEIK |
| SEQ ID | M11 | MALPVTALLLPLALLLHAARPQVQLQQSGAEVKKPGASVKVSCKASGYTFTGYYMHWVRQ |
| NO: | >NE10- | APGQGLEWMGWINPNSGGTNYAQNFQGRVTMTRDTSISTAYMELRRLRSDDTAVYYCASG |
| 1439 | 19WD | WDFDYWGQGTLVTVSSGGGGSGGGGSGGGGSGGGGSDIRMTQSPSSLSASVGDRVTITCR |
| | (M11 | ASQSIRYYLSWYQQKPGKAPKLLIYTASILQNGVPSRFSGSGSGTDFTLTISSLQPEDFA |
| | NE10- | TYYCLQTYTTPDFGPGTKVEIKTTTPAPRPPTPAPTIASQPLSLRPEACRPAAGGAVHTR |
| | 19WD | GLDFACDIYIWAPLAGTCGVLLLSLVITLYCKRGRKKLLYIFKQPFMRPVQTTQEEDGCS |
| | R001-G2 | CRFPEEEEGGCELRVKFSRSADAPAYKQGQNQLYNELNLGRREEYDVLDKRRGRDPEMGG |
| | 126171) | KPRRKNPQEGLYNELQKDKMAEAYSEIGMKGERRRGKGHDGLYQGLSTATKDTYDALHMQ |
| | | ALPPR |
| SEQ ID | M12 | QVQLVQSGAEVKKPGASVKVSCKASGYTFTGYYMHWVRQ |
| NO: | ScFv | APGQGLEWMGRINPNSGGTNYAQKFQGRVTMTTDTSTSTAYMELRSLRSDDTAVYYCART |
| 1440 | domain) | TTSYAFDIWGQGTMVTVSSGGGGSGGGGSGGGGSGGGGSDIQLTQSPSTLSASVGDRVTI |
| | | TCRASQSISTWLAWYQQKPGKAPNLLIYKASTLESGVPSRFSGSGSGTEFTLTISSLQPD |
| | | DFATYYCQQYNTYSPYTFGQGTKLEIK |
| SEQ ID | M12 | MALPVTALLLPLALLLHAARPQVQLVQSGAEVKKPGASVKVSCKASGYTFTGYYMHWVRQ |
| NO: | >DE12- | APGQGLEWMGRINPNSGGTNYAQKFQGRVTMTTDTSTSTAYMELRSLRSDDTAVYYCART |
| 1441 | 14RD | TTSYAFDIWGQGTMVTVSSGGGGSGGGGSGGGGSGGGGSDIQLTQSPSTLSASVGDRVTI |
| | (M12 | TCRASQSISTWLAWYQQKPGKAPNLLIYKASTLESGVPSRFSGSGSGTEFTLTISSLQPD |
| | DE12- | DFATYYCQQYNTYSPYTFGQGTKLEIKTTTPAPRPPTPAPTIASQPLSLRPEACRPAAGG |
| | 14RD | AVHTRGLDFACDIYIWAPLAGTCGVLLLSLVITLYCKRGRKKLLYIFKQPFMRPVQTTQE |
| | R001-G9 | EDGCSCRFPEEEEGGCELRVKFSRSADAPAYKQGQNQLYNELNLGRREEYDVLDKRRGRD |
| | 126172) | PEMGGKPRRKNPQEGLYNELQKDKMAEAYSEIGMKGERRRGKGHDGLYQGLSTATKDTYD |
| | | ALHMQALPPR |
| SEQ ID | M13 | QVQLVQSGGGLVKPGGSLRLSCEASGFIFSDYYMGWIRQ |
| NO: | (ScFv | APGKGLEWVSYIGRSGSSMYYADSVKGRFTFSRDNAKNSLYLQMNSLRAEDTAVYYCAAS |
| 1442 | domain) | PVVAATEDFQHWGQGTLVTVSSGGGGSGGGGSGGGGSGGGGSDIVMTQTPATLSLSPGER |
| | | ATLSCRASQSVTSNYLAWYQQKPGQAPRLLLFGASTRATGIPDRFSGSGSGTDFTLTINR |
| | | LEPEDFAMYYCQQYGSAPVTFGQGTKLEIK |
| SEQ ID | M13 | MALPVTALLLPLALLLHAARPQVQLVQSGGGLVKPGGSLRLSCEASGFIFSDYYMGWIRQ |
| NO: | >TE13- | APGKGLEWVSYIGRSGSSMYYADSVKGRFTFSRDNAKNSLYLQMNSLRAEDTAVYYCAAS |
| 1443 | 19LD | PVVAATEDFQHWGQGTLVTVSSGGGGSGGGGSGGGGSGGGGSDIVMTQTPATLSLSPGER |
| | (M13 | ATLSCRASQSVTSNYLAWYQQKPGQAPRLLLFGASTRATGIPDRFSGSGSGTDFTLTINR |
| | TE13- | LEPEDFAMYYCQQYGSAPVTFGQGTKLEIKTTTPAPRPPTPAPTIASQPLSLRPEACRPA |
| | 19LD | AGGAVHTRGLDFACDIYIWAPLAGTCGVLLLSLVITLYCKRGRKKLLYIFKQPFMRPVQT |
| | R002-C3 | TQEEDGCSCRFPEEEEGGCELRVKFSRSADAPAYKQGQNQLYNELNLGRREEYDVLDKRR |
| | 126173) | GRDPEMGGKPRRKNPQEGLYNELQKDKMAEAYSEIGMKGERRRGKGHDGLYQGLSTATKD |
| | | TYDALHMQALPPR |
| SEQ ID | M14 | QVQLVQSGAEVRAPGASVKISCKASGFTFRGYYIHWVRQ |
| NO: | (ScFv | APGQGLEWMGIINPSGGSRAYAQKFQGRVTMTRDTSTSTVYMELSSLRSDDTAMYYCART |
| 1444 | domain) | ASCGGDCYYLDYWGQGTLVTVSSGGGGSGGGGSGGGGSGGGGSDIQMTQSPPTLSASVGD |
| | | RVTITCRASENVNIWLAWYQQKPGKAPKLLIYKSSSLASGVPSRFSGSGSGAEFTLTISS |
| | | LQPDDFATYYCQQYQSYPLTFGGGTKVDIK |
| SEQ ID | M14 | MALPVTALLLPLALLLHAARPQVQLVQSGAEVRAPGASVKISCKASGFTFRGYYIHWVRQ |
| NO: | >BS83- | APGQGLEWMGIINPSGGSRAYAQKFQGRVTMTRDTSTSTVYMELSSLRSDDTAMYYCART |
| 1445 | 951D | ASCGGDCYYLDYWGQGTLVTVSSGGGGSGGGGSGGGGSGGGGSDIQMTQSPPTLSASVGD |
| | (M14 | RVTITCRASENVNIWLAWYQQKPGKAPKLLIYKSSSLASGVPSRFSGSGSGAEFTLTISS |
| | BS83- | LQPDDFATYYCQQYQSYPLTFGGGTKVDIKTTTPAPRPPTPAPTIASQPLSLRPEACRPA |
| | 95ID | AGGAVHTRGLDFACDIYIWAPLAGTCGVLLLSLVITLYCKRGRKKLLYIFKQPFMRPVQT |
| | R001-E8 | TQEEDGCSCRFPEEEEGGCELRVKFSRSADAPAYKQGQNQLYNELNLGRREEYDVLDKRR |
| | 126174) | GRDPEMGGKPRRKNPQEGLYNELQKDKMAEAYSEIGMKGERRRGKGHDGLYQGLSTATKD |
| | | TYDALHMQALPPR |
| SEQ ID | M15 | QVQLVQSGGGLVQPGRSLRLSCAASGFTFDDYAMHWVRQ |
| NO: | (ScFv | APGKGLEWVSGISWNSGSIGYADSVKGRFTISRDNAKNSLYLQMNSLRAEDTAVYYCAKD |
| 1446 | domain) | GSSSWSWGYFDYWGQGTLVTVSSGGGGSGGGGSGGGGSSSELTQDPAVSVALGQTVRTTC |
| | | QGDALRSYYASWYQQKPGQAPMLVIYGKNNRPSGIPDRFSGSDSGDTASLTITGAQAEDE |
| | | ADYYCNSRDSSGYPVFGTGTKVTVL |
| SEQ ID | M15 | MALPVTALLLPLALLLHAARPQVQLVQSGGGLVQPGRSLRLSCAASGFTFDDYAMHWVRQ |
| NO: | >HS86- | APGKGLEWVSGISWNSGSIGYADSVKGRFTISRDNAKNSLYLQMNSLRAEDTAVYYCAKD |
| 1447 | 94XD | GSSSWSWGYFDYWGQGTLVTVSSGGGGSGGGGSGGGGSSSELTQDPAVSVALGQTVRTTC |
| | (M15 | QGDALRSYYASWYQQKPGQAPMLVIYGKNNRPSGIPDRFSGSDSGDTASLTITGAQAEDE |
| | HS86- | ADYYCNSRDSSGYPVFGTGTKVTVLTTTPAPRPPTPAPTIASQPLSLRPEACRPAAGGAV |
| | 94XD | HTRGLDFACDIYIWAPLAGTCGVLLLSLVITLYCKRGRKKLLYIFKQPFMRPVQTTQEED |
| | NT | GCSCRFPEEEEGGCELRVKFSRSADAPAYKQGQNQLYNELNLGRREEYDVLDKRRGRDPE |
| | 127553) | MGGKPRRKNPQEGLYNELQKDKMAEAYSEIGMKGERRRGKGHDGLYQGLSTATKDTYDAL |
| | | HMQALPPR |
| SEQ ID | M16 | EVQLVESGGGLVQPGRSLRLSCAASGFTFDDYAMHWVRQ |
| NO: | (ScFv | APGKGLEWVSGISWNSGSTGYADSVKGRFTISRDNAKNSLYLQMNSLRAEDTALYYCAKD |
| 1448 | domain) | SSSWYGGGSAFDIWGQGTMVTVSSGGGGSGGGGSGGGGSSSELTQEPAVSVALGQTVRIT |
| | | CQGDSLRSYYASWYQQKPGQAPVLVIFGRSRRPSGIPDRFSGSSSGNTASLIITGAQAED |
| | | EADYYCNSRDNTANHYVFGTGTKLTVL |
| SEQ ID | M16 | MALPVTALLLPLALLLHAARPEVQLVESGGGLVQPGRSLRLSCAASGFTFDDYAMHWVRQ |
| NO: | >XS87- | APGKGLEWVSGISWNSGSTGYADSVKGRFTISRDNAKNSLYLQMNSLRAEDTALYYCAKD |
| 1449 | 99RD | SSSWYGGGSAFDIWGQGTMVTVSSGGGGSGGGGSGGGGSSSELTQEPAVSVALGQTVRIT |
| | (M16 | CQGDSLRSYYASWYQQKPGQAPVLVIFGRSRRPSGIPDRFSGSSSGNTASLIITGAQAED |
| | XS87- | EADYYCNSRDNTANHYVFGTGTKLTVLTTTPAPRPPTPAPTIASQPLSLRPEACRPAAGG |
| | 99RD | AVHTRGLDFACDIYIWAPLAGTCGVLLLSLVITLYCKRGRKKLLYIFKQPFMRPVQTTQE |
| | NT | EDGCSCRFPEEEEGGCELRVKFSRSADAPAYKQGQNQLYNELNLGRREEYDVLDKRRGRD |
| | 127554) | PEMGGKPRRKNPQEGLYNELQKDKMAEAYSEIGMKGERRRGKGHDGLYQGLSTATKDTYD |
| | | ALHMQALPPR |
| SEQ ID | M17 | EVQLVESGGGLVQPGRSLRLSCAASGFTFDDYAMHWVRQ |
| NO: | (ScFv | APGKGLEWVSGISWNSGSTGYADSVKGRFTISRDNAKNSLYLQMNSLRAEDTALYYCAKD |
| 1450 | domain) | SSSWYGGGSAFDIWGQGTMVTVSSGGGGSGGGGSGGGGSSSELTQDPAVSVALGQTVRIT |
| | | CQGDSLRSYYASWYQQKPGQAPVLVIYGKNNRPSGIPDRFSGSSSGNTASLTITGAQAED |
| | | EADYYCNSRGSSGNHYVFGTGTKVTVL |
| SEQ ID | M17 | MALPVTALLLPLALLLHAARPEVQLVESGGGLVQPGRSLRLSCAASGFTFDDYAMHWVRQ |
| NO: | >NS89- | APGKGLEWVSGISWNSGSTGYADSVKGRFTISRDNAKNSLYLQMNSLRAEDTALYYCAKD |
| 1451 | 94MD | SSSWYGGGSAFDIWGQGTMVTVSSGGGGSGGGGSGGGGSSSELTQDPAVSVALGQTVRIT |
| | (M17 | CQGDSLRSYYASWYQQKPGQAPVLVIYGKNNRPSGIPDRFSGSSSGNTASLTITGAQAED |
| | NS89- | EADYYCNSRGSSGNHYVFGTGTKVTVLTTTPAPRPPTPAPTIASQPLSLRPEACRPAAGG |
| | 94MD | AVHTRGLDFACDIYIWAPLAGTCGVLLLSLVITLYCKRGRKKLLYIFKQPFMRPVQTTQE |
| | NT | EDGCSCRFPEEEEGGCELRVKFSRSADAPAYKQGQNQLYNELNLGRREEYDVLDKRRGRD |
| | 127555) | PEMGGKPRRKNPQEGLYNELQKDKMAEAYSEIGMKGERRRGKGHDGLYQGLSTATKDTYD |
| | | ALHMQALPPR |
| SEQ ID | M18 | QVQLVQSGGGLVQPGGSLRLSCAASGFTFSSYWMHWVRQ |
| NO: | (ScFv | APGKGLVWVSRINSDGSSTSYADSVKGRFTISRDNAKNTLYLQMNSLRAEDTAVYYCVRT |
| 1452 | domain) | GWVGSYYYYMDVWGKGTTVTVSSGGGGSGGGGSGGGGSGGGGSEIVLTQSPGTLSLSPGE |
| | | RATLSCRASQSVSSNYLAWYQQKPGQPPRLLIYDVSTRATGIPARFSGGGSGTDFTLTIS |
| | | SLEPEDFAVYYCQQRSNWPPWTFGQGTKVEIK |
| SEQ ID | M18 | MALPVTALLLPLALLLHAARPQVQLVQSGGGLVQPGGSLRLSCAASGFTFSSYWMHWVRQ |
| NO: | >DS90- | APGKGLVWVSRINSDGSSTSYADSVKGRFTISRDNAKNTLYLQMNSLRAEDTAVYYCVRT |
| 1453 | 09HD | GWVGSYYYYMDVWGKGTTVTVSSGGGGSGGGGSGGGGSGGGGSEIVLTQSPGTLSLSPGE |
| | (M18 | RATLSCRASQSVSSNYLAWYQQKPGQPPRLLIYDVSTRATGIPARFSGGGSGTDFTLTIS |
| | DS90- | SLEPEDFAVYYCQQRSNWPPWTFGQGTKVEIKTTTPAPRPPTPAPTIASQPLSLRPEACR |
| | 09HD | PAAGGAVHTRGLDFACDIYIWAPLAGTCGVLLLSLVITLYCKRGRKKLLYIFKQPFMRPV |
| | R003- | QTTQEEDGCSCRFPEEEEGGCELRVKFSRSADAPAYKQGQNQLYNELNLGRREEYDVLDK |
| | A05 | RRGRDPEMGGKPRRKNPQEGLYNELQKDKMAEAYSEIGMKGERRRGKGHDGLYQGLSTAT |
| | 127556) | KDTYDALHMQALPPR |
| SEQ ID | M19 | QVQLVQSGGGVVQPGRSLRLSCAASGFTFSSYGMHWVRQ |
| NO: | (ScFv | APGKGLEWVAVISYDGSNKYYADSVKGRFTISRDNSKNTLYLQMNSLRAEDTAVYYCAKG |
| 1454 | domain) | YSRYYYYGMDVWGQGTTVTVSSGGGGSGGGGSGGGGSGGGGSEIVMTQSPATLSLSPGER |
| | | AILSCRASQSVYTKYLGWYQQKPGQAPRLLIYDASTRATGIPDRFSGSGSGTDFTLTINR |
| | | LEPEDFAVYYCQHYGGSPLITFGQGTKVDIK |
| SEQ ID | M19 | MALPVTALLLPLALLLHAARPQVQLVQSGGGVVQPGRSLRLSCAASGFTFSSYGMHWVRQ |
| NO: | >TS92- | APGKGLEWVAVISYDGSNKYYADSVKGRFTISRDNSKNTLYLQMNSLRAEDTAVYYCAKG |
| 1455 | 04BD | YSRYYYYGMDVWGQGTTVTVSSGGGGSGGGGSGGGGSGGGGSEIVMTQSPATLSLSPGER |
| | (M19 | AILSCRASQSVYTKYLGWYQQKPGQAPRLLIYDASTRATGIPDRFSGSGSGTDFTLTINR |
| | TS92- | LEPEDFAVYYCQHYGGSPLITFGQGTKVDIKTTTPAPRPPTPAPTIASQPLSLRPEACRP |
| | 04BD | AAGGAVHTRGLDFACDIYIWAPLAGTCGVLLLSLVITLYCKRGRKKLLYIFKQPFMRPVQ |
| | R003- | TTQEEDGCSCRFPEEEEGGCELRVKFSRSADAPAYKQGQNQLYNELNLGRREEYDVLDKR |
| | C06 | RGRDPEMGGKPRRKNPQEGLYNELQKDKMAEAYSEIGMKGERRRGKGHDGLYQGLSTATK |
| | 127557) | DTYDALHMQALPPR |
| SEQ ID | M20 | QVQLVQSGGGLVQPGGSLRLSCAASGFTFSSYAMSWVRQ |
| NO: | (ScFv | APGKGLEWVSAISGSGGSTYYADSVKGRFTISRDNSKNTLYLQMNSLRAEDTAVYYCAKR |
| 1456 | domain) | EAAAGHDWYFDLWGRGTLVTVSSGGGGSGGGGSGGGGSGGGGSDIRVTQSPSSLSASVGD |
| | | RVTITCRASQSISSYLNWYQQKPGKAPKLLIYAASSLQSGVPSRFSGSGSGTDFTLTISS |
| | | LQPEDFATYYCQQSYSIPLTFGQGTKVEIK |
| SEQ ID | M20 (full) | MALPVTALLLPLALLLHAARPQVQLVQSGGGLVQPGGSLRLSCAASGFTFSSYAMSWVRQ |
| NO: | >JS93- | APGKGLEWVSAISGSGGSTYYADSVKGRFTISRDNSKNTLYLQMNSLRAEDTAVYYCAKR |
| 1457 | 08WD | EAAAGHDWYFDLWGRGTLVTVSSGGGGSGGGGSGGGGSGGGGSDIRVTQSPSSLSASVGD |
| | (M20 | RVTITCRASQSISSYLNWYQQKPGKAPKLLIYAASSLQSGVPSRFSGSGSGTDFTLTISS |
| | JS93- | LQPEDFATYYCQQSYSIPLTFGQGTKVEIKTTTPAPRPPTPAPTIASQPLSLRPEACRPA |
| | 08WD | AGGAVHTRGLDFACDIYIWAPLAGTCGVLLLSLVITLYCKRGRKKLLYIFKQPFMRPVQT |
| | R003- | TQEEDGCSCRFPEEEEGGCELRVKFSRSADAPAYKQGQNQLYNELNLGRREEYDVLDKRR |
| | E07 | GRDPEMGGKPRRKNPQEGLYNELQKDKMAEAYSEIGMKGERRRGKGHDGLYQGLSTATKD |
| | 127558) | TYDALHMQALPPR |
| SEQ ID | M21 | QVQLVQSWAEVKKPGASVKVSCKASGYTFTSYYMHWVRQAPGQGLEWMGIINPSGGSTSY |
| NO: | (ScFv | AQKFQGRVTMTRDTSTSTVYMELSNLRSEDTAVYYCARSPRVTTGYFDYWGQGTLVTVSS |
| 1458 | domain) | GGGGSGGGGSGGGGSGGGGSDIQLTQSPSTLSASVGDRVTITCRASQSISSWLAWYQQKP |
| | | GKAPKLLIYKASSLESGVPSRFSGSGSGTEFTLTISSLQPDDFATYYCQQYSSYPLTFGG |
| | | GTRLEIK |
| SEQ ID | M21 (full | MALPVTALLLPLALLLHAARPQVQLVQSWAEVKKPGASVKVSCKASGYTFTSYYMHWVRQ |
| NO: | CAR) | APGQGLEWMGIINPSGGSTSYAQKFQGRVTMTRDTSTSTVYMELSNLRSEDTAVYYCARS |
| 1459 | | PRVTTGYFDYWGQGTLVTVSSGGGGSGGGGSGGGGSGGGGSDIQLTQSPSTLSASVGDRV |
| | | TITCRASQSISSWLAWYQQKPGKAPKLLIYKASSLESGVPSRFSGSGSGTEFTLTISSLQ |
| | | PDDFATYYCQQYSSYPLTFGGGTRLEIKTTTPAPRPPTPAPTIASQPLSLRPEACRPA |
| | | AGGAVHTRGLDFACDIYIWAPLAGTCGVLLLSLVITLYCKRGRKKLLYIFKQPFMRPVQT |
| | | TQEEDGCSCRFPEEEEGGCELRVKFSRSADAPAYKQGQNQLYNELNLGRREEYDVLDKRR |
| | | GRDPEMGGKPRRKNPQEGLYNELQKDKMAEAYSEIGMKGERRRGKGHDGLYQGLSTATKD |
| | | TYDALHMQALPPR |
| SEQ ID | M22 | QVQLVQSGAEVRRPGASVKISCRASGDTSTRHYIHWLRQAPGQGPEWMGVINPTTGPATG |
| NO: | (ScFv | SPAYAQMLQGRVTMTRDTSTRTVYMELRSLRFEDTAVYYCARSVVGRSAPYYFDYWGQGT |
| 1460 | domain) | LVTVSSGGGGSGGGGSGGGGSGGGGSDIQMTQSPSSLSASVGDRVTITCRASQGISDYSA |
| | | WYQQKPGKAPKLLIYAASTLQSGVPSRFSGSGSGTDFTLTISYLQSEDFATYYCQQYYSY |
| | | PLTFGGGTKVDIK |
| SEQ ID | M22 (full | MALPVTALLLPLALLLHAARPQVQLVQSGAEVRRPGASVKISCRASGDTSTRHYIHWLRQ |
| NO: | CAR) | APGQGPEWMGVINPTTGPATGSPAYAQMLQGRVTMTRDTSTRTVYMELRSLRFEDTAVYY |
| 1461 | | CARSVVGRSAPYYFDYWGQGTLVTVSSGGGGSGGGGSGGGGSGGGGSDIQMTQSPSSLSA |
| | | SVGDRVTITCRASQGISDYSAWYQQKPGKAPKLLIYAASTLQSGVPSRFSGSGSGTDFTL |
| | | TISYLQSEDFATYYCQQYYSYPLTFGGGTKVDIKTTTPAPRPPTPAPTIASQPLSLRPEA |
| | | CRPA |
| | | AGGAVHTRGLDFACDIYIWAPLAGTCGVLLLSLVITLYCKRGRKKLLYIFKQPFMRPVQT |
| | | TQEEDGCSCREPEEEEGGCELRVKFSRSADAPAYKQGQNQLYNELNLGRREEYDVLDKRR |
| | | GRDPEMGGKPRRKNPQEGLYNELQKDKMAEAYSEIGMKGERRRGKGHDGLYQGLSTATKD |
| | | TYDALHMQALPPR |
| SEQ ID | M23 | QVQLQQSGAEVKKPGASVKVSCKASGYTFTNYYMHWVRQAPGQGLEWMGIINPSGGYTTY |
| NO: | (ScFv | AQKFQGRLTMTRDTSTSTVYMELSSLRSEDTAVYYCARIRSCGGDCYYFDNWGQGTLVTV |
| 1462 | domain) | SSGGGGSGGGGSGGGGSGGGGSDIQLTQSPSTLSASVGDRVTITCRASENVNIWLAWYQQ |
| | | KPGKAPKLLIYKSSSLASGVPSRFSGSGSGAEFTLTISSLQPDDFATYYCQQYQSYPLTF |
| | | GGGTKVDIK |
| SEQ ID | M23 (full | MALPVTALLLPLALLLHAARPQVQLQQSGAEVKKPGASVKVSCKASGYTFTNYYMHWVRQ |
| NO: | CAR) | APGQGLEWMGIINPSGGYTTYAQKFQGRLTMTRDTSTSTVYMELSSLRSEDTAVYYCARI |
| 1463 | | RSCGGDCYYFDNWGQGTLVTVSSGGGGSGGGGSGGGGSGGGGSDIQLTQSPSTLSASVGD |
| | | RVTITCRASENVNIWLAWYQQKPGKAPKLLIYKSSSLASGVPSRFSGSGSGAEFTLTISS |
| | | LQPDDFATYYCQQYQSYPLTEGGGTKVDIKTTTPAPRPPTPAPTIASQPLSLRPEACRPA |
| | | AGGAVHTRGLDFACDIYIWAPLAGTCGVLLLSLVITLYCKRGRKKLLYIFKQPFMRPVQT |
| | | TQEEDGCSCREPEEEEGGCELRVKFSRSADAPAYKQGQNQLYNELNLGRREEYDVLDKRR |
| | | GRDPEMGGKPRRKNPQEGLYNELQKDKMAEAYSEIGMKGERRRGKGHDGLYQGLSTATKD |
| | | TYDALHMQALPPR |
| SEQ ID | M24 | QITLKESGPALVKPTQTLTLTCTFSGFSLSTAGVHVGWIRQPPGKALEWLALISWADDKR |
| NO: | (ScFv | YRPSLRSRLDITRVTSKDQVVLSMTNMQPEDTATYYCALQGFDGYEANWGPGTLVTVSSG |
| 1464 | domain) | GGGSGGGGSGGGGSGGGGSDIVMTQSPSSLSASAGDRVTITCRASRGISSALAWYQQKPG |
| | | KPPKLLIYDASSLESGVPSRFSGSGSGTDFTLTIDSLEPEDFATYYCQQSYSTPWTFGQG |
| | | TKVDIK |
| SEQ ID | M24 (full | MALPVTALLLPLALLLHAARPQITLKESGPALVKPTQTLTLTCTFSGFSLSTAGVHVGWI |
| NO: | CAR) | RQPPGKALEWLALISWADDKRYRPSLRSRLDITRVTSKDQVVLSMTNMQPEDTATYYCAL |
| 1465 | | QGFDGYEANWGPGTLVTVSSGGGGSGGGGSGGGGSGGGGSDIVMTQSPSSLSASAGDRVT |
| | | ITCRASRGISSALAWYQQKPGKPPKLLIYDASSLESGVPSRFSGSGSGTDFTLTIDSLEP |
| | | EDFATYYCQQSYSTPWTFGQGTKVDIKTTTPAPRPPTPAPTIASQPLSLRPEACRPA |
| | | AGGAVHTRGLDFACDIYIWAPLAGTCGVLLLSLVITLYCKRGRKKLLYIFKQPFMRPVQT |
| | | TQEEDGCSCRFPEEEEGGCELRVKFSRSADAPAYKQGQNQLYNELNLGRREEYDVLDKRR |
| | | GRDPEMGGKPRRKNPQEGLYNELQKDKMAEAYSEIGMKGERRRGKGHDGLYQGLSTATKD |
| | | TYDALHMQALPPR |
| SEQ ID | Ss1 (scFv | QVQLQQSGPELEKPGASVKISCKASGYSFTGYTMNWVKQSHGKSLEWIGLITPYNGASS |
| NO: | domain) | YNQKFRGKATLTVDKSSSTAYMDLLSLTSEDSAVYFCARGGYDGRGFDYWGQGTTVTVS |
| 1466 | | SGGGGSGGGGSGGGGSDIELTQSPAIMSASPGEKVTMTCSASSSVSYMHWYQQKSGTSP |
| | | KRWIYDTSKLASGVPGRFSGSGSGNSYSLTISSVEAEDDATYYCQQWSGYPLTFGAGTK |
| | | LEI |
| SEQ ID | Ss1 (full | MALPVTALLLPLALLLHAARPQVQLQQSGPELEKPGASVKISCKASGYSFTGYTMNWVK |
| NO: | CAR) | QSHGKSLEWIGLITPYNGASSYNQKFRGKATLTVDKSSSTAYMDLLSLTSEDSAVYFCA |
| 1467 | | RGGYDGRGFDYWGQGTTVTVSSGGGGSGGGGSGGGGSDIELTQSPAIMSASPGEKVTMT |
| | | CSASSSVSYMHWYQQKSGTSPKRWIYDTSKLASGVPGRFSGSGSGNSYSLTISSVEAED |
| | | DATYYCQQWSGYPLTFGAGTKLEITTTPAPRPPTPAPTIASQPLSLRPEACRPAAGGAV |
| | | HTRGLDFACDIYIWAPLAGTCGVLLLSLVITLYCKRGRKKLLYIFKQPFMRPVQTTQEE |
| | | DGCSCRFPEEEEGGCELRVKFSRSADAPA |

### RNA Transfection

[0286] Disclosed herein are methods for producing an in vitro transcribed RNA CAR IL-15R/IL-15. The present invention also includes a CAR IL-15R/IL-15 encoding RNA construct that can be directly transfected into a cell. A method for generating mRNA for use in transfection can involve in vitro transcription (IVT) of a template with specially designed primers, followed by polyA addition, to produce a construct containing 3′ and 5′ untranslated sequence (“UTR”), a 5′ cap and/or Internal Ribosome Entry Site (IRES), the nucleic acid to be expressed, and a polyA tail, typically 50-2000 bases (SEQ ID NO: 1468) in length. RNA so produced can efficiently transfect different kinds of cells. In one aspect, the template includes sequences for the CAR.

[0287] In one aspect the CAR IL-15R/IL-15 is encoded by a messenger RNA (mRNA). In one aspect the mRNA encoding the CAR IL-15R/IL-15 is introduced into an immune effector cell, e.g., a T cell or a NK cell, for production of a CAR IL-15R/IL-15-expressing cell (e.g., CAR IL-15R/IL-15 T cell or CAR IL-15R/IL-15-expressing NK cell).

[0288] In one embodiment, the in vitro transcribed RNA CAR IL-15R/IL-15 can be introduced to a cell as a form of transient transfection. The RNA is produced by in vitro transcription using a polymerase chain reaction (PCR)-generated template. DNA of interest from any source can be directly converted by PCR into a template for in vitro mRNA synthesis using appropriate primers and RNA polymerase. The source of the DNA can be, for example, genomic DNA, plasmid DNA, phage DNA, cDNA, synthetic DNA sequence or any other appropriate source of DNA. The desired temple for in vitro transcription is a CAR of the present invention. For example, the template for the RNA CAR comprises an extracellular region comprising a single chain variable domain of an anti-tumor antibody; a hinge region, a transmembrane domain (e.g., a transmembrane domain of CD8a); and a cytoplasmic region that includes an intracellular signaling domain, e.g., comprising the signaling domain of CD3-zeta and the signaling domain of 4-1BB.

[0289] In one embodiment, the DNA to be used for PCR contains an open reading frame. The DNA can be from a naturally occurring DNA sequence from the genome of an organism. In one embodiment, the nucleic acid can include some or all of the 5′ and/or 3′ untranslated regions (UTRs). The nucleic acid can include exons and introns. In one embodiment, the DNA to be used for PCR is a human nucleic acid sequence. In another embodiment, the DNA to be used for PCR is a human nucleic acid sequence including the 5′ and 3′ UTRs. The DNA can alternatively be an artificial DNA sequence that is not normally expressed in a naturally occurring organism. An exemplary artificial DNA sequence is one that contains portions of genes that are ligated together to form an open reading frame that encodes a fusion protein. The portions of DNA that are ligated together can be from a single organism or from more than one organism.

[0290] PCR is used to generate a template for in vitro transcription of mRNA which is used for transfection. Methods for performing PCR are well known in the art. Primers for use in PCR are designed to have regions that are substantially complementary to regions of the DNA to be used as a template for the PCR. “Substantially complementary,” as used herein, refers to sequences of nucleotides where a majority or all of the bases in the primer sequence are complementary, or one or more bases are non-complementary, or mismatched. Substantially complementary sequences are able to anneal or hybridize with the intended DNA target under annealing conditions used for PCR. The primers can be designed to be substantially complementary to any portion of the DNA template. For example, the primers can be designed to amplify the portion of a nucleic acid that is normally transcribed in cells (the open reading frame), including 5′ and 3′ UTRs. The primers can also be designed to amplify a portion of a nucleic acid that encodes a particular domain of interest. In one embodiment, the primers are designed to amplify the coding region of a human cDNA, including all or portions of the 5′ and 3′ UTRs. Primers useful for PCR can be generated by synthetic methods that are well known in the art. “Forward primers” are primers that contain a region of nucleotides that are substantially complementary to nucleotides on the DNA template that are upstream of the DNA sequence that is to be amplified. “Upstream” is used herein to refer to a location 5, to the DNA sequence to be amplified relative to the coding strand. “Reverse primers” are primers that contain a region of nucleotides that are substantially complementary to a double-stranded DNA template that are downstream of the DNA sequence that is to be amplified. “Downstream” is used herein to refer to a location 3′ to the DNA sequence to be amplified relative to the coding strand.

[0291] Any DNA polymerase useful for PCR can be used in the methods disclosed herein. The reagents and polymerase are commercially available from a number of sources.

[0292] Chemical structures with the ability to promote stability and/or translation efficiency may also be used. The RNA preferably has 5′ and 3′ UTRs. In one embodiment, the 5′ UTR is between one and 3000 nucleotides in length. The length of 5′ and 3′ UTR sequences to be added to the coding region can be altered by different methods, including, but not limited to, designing primers for PCR that anneal to different regions of the UTRs. Using this approach, one of ordinary skill in the art can modify the 5′ and 3′ UTR lengths required to achieve optimal translation efficiency following transfection of the transcribed RNA.

[0293] The 5′ and 3′ UTRs can be the naturally occurring, endogenous 5′ and 3′ UTRs for the nucleic acid of interest. Alternatively, UTR sequences that are not endogenous to the nucleic acid of interest can be added by incorporating the UTR sequences into the forward and reverse primers or by any other modifications of the template. The use of UTR sequences that are not endogenous to the nucleic acid of interest can be useful for modifying the stability and/or translation efficiency of the RNA. For example, it is known that AU-rich elements in 3′ UTR sequences can decrease the stability of mRNA. Therefore, 3′ UTRs can be selected or designed to increase the stability of the transcribed RNA based on properties of UTRs that are well known in the art.

[0294] In one embodiment, the 5′ UTR can contain the Kozak sequence of the endogenous nucleic acid. Alternatively, when a 5′ UTR that is not endogenous to the nucleic acid of interest is being added by PCR as described above, a consensus Kozak sequence can be redesigned by adding the 5′ UTR sequence. Kozak sequences can increase the efficiency of translation of some RNA transcripts, but does not appear to be required for all RNAs to enable efficient translation. The requirement for Kozak sequences for many mRNAs is known in the art. In other embodiments the 5′ UTR can be 5′UTR of an RNA virus whose RNA genome is stable in cells. In other embodiments various nucleotide analogues can be used in the 3′ or 5′ UTR to impede exonuclease degradation of the mRNA.

[0295] To enable synthesis of RNA from a DNA template without the need for gene cloning, a promoter of transcription should be attached to the DNA template upstream of the sequence to be transcribed. When a sequence that functions as a promoter for an RNA polymerase is added to the 5′ end of the forward primer, the RNA polymerase promoter becomes incorporated into the PCR product upstream of the open reading frame that is to be transcribed. In one preferred embodiment, the promoter is a T7 polymerase promoter, as described elsewhere herein. Other useful promoters include, but are not limited to, T3 and SP6 RNA polymerase promoters. Consensus nucleotide sequences for T7, T3 and SP6 promoters are known in the art.

[0296] In a preferred embodiment, the mRNA has both a cap on the 5′ end and a 3′ poly(A) tail which determine ribosome binding, initiation of translation and stability mRNA in the cell. On a circular DNA template, for instance, plasmid DNA, RNA polymerase produces a long concatameric product which is not suitable for expression in eukaryotic cells. The transcription of plasmid DNA linearized at the end of the 3′ UTR results in normal sized mRNA which is not effective in eukaryotic transfection even if it is polyadenylated after transcription.

[0297] On a linear DNA template, phage T7 RNA polymerase can extend the 3′ end of the transcript beyond the last base of the template (Schenborn and Mierendorf, Nuc Acids Res., 13:6223-36 (1985); Nacheva and Berzal-Herranz, Eur. J. Biochem., 270:1485-65 (2003).

[0298] The conventional method of integration of polyA/T stretches into a DNA template is molecular cloning. However polyA/T sequence integrated into plasmid DNA can cause plasmid instability, which is why plasmid DNA templates obtained from bacterial cells are often highly contaminated with deletions and other aberrations. This makes cloning procedures not only laborious and time consuming but often not reliable. That is why a method which allows construction of DNA templates with polyA/T 3′ stretch without cloning highly desirable.

[0299] The polyA/T segment of the transcriptional DNA template can be produced during PCR by using a reverse primer containing a polyT tail, such as 100 T tail (SEQ ID NO: 1469) (size can be 50-5000 T (SEQ ID NO: 1470)), or after PCR by any other method, including, but not limited to, DNA ligation or in vitro recombination. Poly(A) tails also provide stability to RNAs and reduce their degradation. Generally, the length of a poly(A) tail positively correlates with the stability of the transcribed RNA. In one embodiment, the poly(A) tail is between 100 and 5000 adenosines (SEQ ID NO: 1471).

[0300] Poly(A) tails of RNAs can be further extended following in vitro transcription with the use of a poly(A) polymerase, such as E. coli polyA polymerase (E-PAP). In one embodiment, increasing the length of a poly(A) tail from 100 nucleotides to between 300 and 400 nucleotides (SEQ ID NO: 1472) results in about a two-fold increase in the translation efficiency of the RNA. Additionally, the attachment of different chemical groups to the 3′ end can increase mRNA stability. Such attachment can contain modified/artificial nucleotides, aptamers and other compounds. For example, ATP analogs can be incorporated into the poly(A) tail using poly(A) polymerase. ATP analogs can further increase the stability of the RNA.

[0301] 5′ caps on also provide stability to RNA molecules. In a preferred embodiment, RNAs produced by the methods disclosed herein include a 5′ cap. The 5′ cap is provided using techniques known in the art and described herein (Cougot, et al., Trends in Biochem. Sci., 29:436-444 (2001); Stepinski, et al., RNA, 7:1468-95 (2001); Elango, et al., Biochim. Biophys. Res. Commun., 330:958-966 (2005)).

[0302] The RNAs produced by the methods disclosed herein can also contain an internal ribosome entry site (IRES) sequence. The IRES sequence may be any viral, chromosomal or artificially designed sequence which initiates cap-independent ribosome binding to mRNA and facilitates the initiation of translation. Any solutes suitable for cell electroporation, which can contain factors facilitating cellular permeability and viability such as sugars, peptides, lipids, proteins, antioxidants, and surfactants can be included.

[0303] RNA can be introduced into target cells using any of a number of different methods, for instance, commercially available methods which include, but are not limited to, electroporation (Amaxa Nucleofector-II (Amaxa Biosystems, Cologne, Germany)), (ECM 830 (BTX) (Harvard Instruments, Boston, Mass.) or the Gene Pulser II (BioRad, Denver, Colo.), Multiporator (Eppendort, Hamburg Germany), cationic liposome mediated transfection using lipofection, polymer encapsulation, peptide mediated transfection, or biolistic particle delivery systems such as “gene guns” (see, for example, Nishikawa, et al. Hum Gene Ther., 12(8):861-70 (2001).

[0304] Non-Viral Delivery Methods

[0305] In some aspects, non-viral methods can be used to deliver a nucleic acid encoding a CAR IL-15R/IL-15 described herein into a cell or tissue or a subject.

[0306] In some embodiments, the non-viral method includes the use of a transposon (also called a transposable element). In some embodiments, a transposon is a piece of DNA that can insert itself at a location in a genome, for example, a piece of DNA that is capable of self-replicating and inserting its copy into a genome, or a piece of DNA that can be spliced out of a longer nucleic acid and inserted into another place in a genome. For example, a transposon comprises a DNA sequence made up of inverted repeats flanking genes for transposition.

[0307] Exemplary methods of nucleic acid delivery using a transposon include a Sleeping Beauty transposon system (SBTS) and a piggyBac (PB) transposon system. See, e.g., Aronovich et al. Hum. Mol. Genet. 20.R1(2011):R14-20; Singh et al. Cancer Res. 15(2008):2961-2971; Huang et al. Mol. Ther. 16(2008):580-589; Grabundzija et al. Mol. Ther. 18(2010):1200-1209; Kebriaei et al. Blood. 122.21(2013):166; Williams Molecular Therapy 16.9(2008):1515-16; Bell et al. Nat. Protoc. 2.12(2007):3153-65; and Ding et al. Cell. 122.3(2005):473-83, all of which are incorporated herein by reference.

[0308] The SBTS includes two components: 1) a transposon containing a transgene and 2) a source of transposase enzyme. The transposase can transpose the transposon from a carrier plasmid (or other donor DNA) to a target DNA, such as a host cell chromosome/genome. For example, the transposase binds to the carrier plasmid/donor DNA, cuts the transposon (including transgene(s)) out of the plasmid, and inserts it into the genome of the host cell. See, e.g., Aronovich et al. supra.

[0309] Exemplary transposons include a pT2-based transposon. See, e.g., Grabundzija et al. Nucleic Acids Res. 41.3(2013):1829-47; and Singh et al. Cancer Res. 68.8(2008): 2961-2971, all of which are incorporated herein by reference. Exemplary transposases include a Tc1/mariner-type transposase, e.g., the SB10 transposase or the SB11 transposase (a hyperactive transposase which can be expressed, e.g., from a cytomegalovirus promoter). See, e.g., Aronovich et al.; Kebriaei et al.; and Grabundzija et al., all of which are incorporated herein by reference.

[0310] Use of the SBTS permits efficient integration and expression of a transgene, e.g., a nucleic acid encoding a CAR described herein. Provided herein are methods of generating a cell, e.g., T cell or NK cell, that stably expresses a CAR described herein, e.g., using a transposon system such as SBTS.

[0311] In accordance with methods described herein, in some embodiments, one or more nucleic acids, e.g., plasmids, containing the SBTS components are delivered to a cell (e.g., T or NK cell). For example, the nucleic acid(s) are delivered by standard methods of nucleic acid (e.g., plasmid DNA) delivery, e.g., methods described herein, e.g., electroporation, transfection, or lipofection. In some embodiments, the nucleic acid contains a transposon comprising a transgene, e.g., a nucleic acid encoding a CAR described herein. In some embodiments, the nucleic acid contains a transposon comprising a transgene (e.g., a nucleic acid encoding a CAR described herein) as well as a nucleic acid sequence encoding a transposase enzyme. In other embodiments, a system with two nucleic acids is provided, e.g., a dual-plasmid system, e.g., where a first plasmid contains a transposon comprising a transgene, and a second plasmid contains a nucleic acid sequence encoding a transposase enzyme. For example, the first and the second nucleic acids are co-delivered into a host cell.

[0312] In some embodiments, cells, e.g., T or NK cells, are generated that express a CAR described herein by using a combination of gene insertion using the SBTS and genetic editing using a nuclease (e.g., Zinc finger nucleases (ZFNs), Transcription Activator-Like Effector Nucleases (TALENs), the CRISPR/Cas system, or engineered meganuclease re-engineered homing endonucleases).

[0313] In some embodiments, use of a non-viral method of delivery permits reprogramming of cells, e.g., T or NK cells, and direct infusion of the cells into a subject. Advantages of non-viral vectors include but are not limited to the ease and relatively low cost of producing sufficient amounts required to meet a patient population, stability during storage, and lack of immunogenicity.

### Nucleic Acid Constructs Encoding a CAR

[0314] The present invention also provides nucleic acid molecules encoding one or more CAR IL-15R/IL-15 constructs described herein. In one aspect, the nucleic acid molecule is provided as a messenger RNA transcript. In one aspect, the nucleic acid molecule is provided as a DNA construct.

[0315] Accordingly, in one aspect, the invention pertains to an isolated nucleic acid molecule encoding a chimeric antigen receptor (CAR), an IL-15R molecule and an IL-15 molecule, wherein the CAR comprises an antigen binding domain, a transmembrane domain, and an intracellular signaling domain comprising a stimulatory domain, e.g., a costimulatory signaling domain and/or a primary signaling domain, e.g., zeta chain.

[0316] The nucleic acid sequences coding for the desired molecules can be obtained using recombinant methods known in the art, such as, for example by screening libraries from cells expressing the gene, by deriving the gene from a vector known to include the same, or by isolating directly from cells and tissues containing the same, using standard techniques. Alternatively, the gene of interest can be produced synthetically, rather than cloned.

[0317] The present invention also provides vectors in which a DNA of the present invention is inserted. Vectors derived from retroviruses such as the lentivirus are suitable tools to achieve long-term gene transfer since they allow long-term, stable integration of a transgene and its propagation in daughter cells. Lentiviral vectors have the added advantage over vectors derived from onco-retroviruses such as murine leukemia viruses in that they can transduce non-proliferating cells, such as hepatocytes. They also have the added advantage of low immunogenicity. A retroviral vector may also be, e.g., a gammaretroviral vector. A gammaretroviral vector may include, e.g., a promoter, a packaging signal (ψ), a primer binding site (PBS), one or more (e.g., two) long terminal repeats (LTR), and a transgene of interest, e.g., a gene encoding a CAR. A gammaretroviral vector may lack viral structural gens such as gag, pol, and env. Exemplary gammaretroviral vectors include Murine Leukemia Virus (MLV), Spleen-Focus Forming Virus (SFFV), and Myeloproliferative Sarcoma Virus (MPSV), and vectors derived therefrom. Other gammaretroviral vectors are described, e.g., in Tobias Maetzig et al., “Gammaretroviral Vectors: Biology, Technology and Application” Viruses. 2011 June; 3(6): 677-713.

[0318] In another embodiment, the vector comprising the nucleic acid encoding the desired CAR of the invention is an adenoviral vector (A5/35). In another embodiment, the expression of nucleic acids encoding CAR IL-15R/IL-15 can be accomplished using of transposons such as sleeping beauty, CRISPR, CAS9, and zinc finger nucleases. See below June et al. 2009 Nature Reviews Immunology 9.10: 704-716, is incorporated herein by reference.

[0319] In brief summary, the expression of natural or synthetic nucleic acids encoding CAR IL-15R/IL-15 is typically achieved by operably linking a nucleic acid encoding the CAR IL-15R/IL-15 polypeptide or portions thereof to a promoter, and incorporating the construct into an expression vector. The vectors can be suitable for replication and integration eukaryotes. Typical cloning vectors contain transcription and translation terminators, initiation sequences, and promoters useful for regulation of the expression of the desired nucleic acid sequence.

[0320] The expression constructs of the present invention may also be used for nucleic acid immunization and gene therapy, using standard gene delivery protocols. Methods for gene delivery are known in the art. See, e.g., U.S. Pat. Nos. 5,399,346, 5,580,859, 5,589,466, incorporated by reference herein in their entireties. In another embodiment, the invention provides a gene therapy vector.

[0321] The nucleic acid can be cloned into a number of types of vectors. For example, the nucleic acid can be cloned into a vector including, but not limited to a plasmid, a phagemid, a phage derivative, an animal virus, and a cosmid. Vectors of particular interest include expression vectors, replication vectors, probe generation vectors, and sequencing vectors.

[0322] Further, the expression vector may be provided to a cell in the form of a viral vector. Viral vector technology is well known in the art and is described, for example, in Sambrook et al., 2012, MOLECULAR CLONING: A LABORATORY MANUAL, volumes 1-4, Cold Spring Harbor Press, NY), and in other virology and molecular biology manuals. Viruses, which are useful as vectors include, but are not limited to, retroviruses, adenoviruses, adeno-associated viruses, herpes viruses, and lentiviruses. In general, a suitable vector contains an origin of replication functional in at least one organism, a promoter sequence, convenient restriction endonuclease sites, and one or more selectable markers, (e.g., WO 01/96584; WO 01/29058; and U.S. Pat. No. 6,326,193).

[0323] A number of viral based systems have been developed for gene transfer into mammalian cells. For example, retroviruses provide a convenient platform for gene delivery systems. A selected gene can be inserted into a vector and packaged in retroviral particles using techniques known in the art. The recombinant virus can then be isolated and delivered to cells of the subject either in vivo or ex vivo. A number of retroviral systems are known in the art. In some embodiments, adenovirus vectors are used. A number of adenovirus vectors are known in the art. In one embodiment, lentivirus vectors are used.

[0324] Additional promoter elements, e.g., enhancers, regulate the frequency of transcriptional initiation. Typically, these are located in the region 30-110 bp upstream of the start site, although a number of promoters have been shown to contain functional elements downstream of the start site as well. The spacing between promoter elements frequently is flexible, so that promoter function is preserved when elements are inverted or moved relative to one another. In the thymidine kinase (tk) promoter, the spacing between promoter elements can be increased to 50 bp apart before activity begins to decline. Depending on the promoter, it appears that individual elements can function either cooperatively or independently to activate transcription.

[0325] An example of a promoter that is capable of expressing a CAR IL-15R/IL-15 transgene in a mammalian T cell is the EF1a promoter. The native EF1a promoter drives expression of the alpha subunit of the elongation factor-1 complex, which is responsible for the enzymatic delivery of aminoacyl tRNAs to the ribosome. The EF1a promoter has been extensively used in mammalian expression plasmids and has been shown to be effective in driving CAR IL-15R/IL-15 expression from transgenes cloned into a lentiviral vector. See, e.g., Milone et al., Mol. Ther. 17(8): 1453-1464 (2009).

[0326] Another example of a promoter is the immediate early cytomegalovirus (CMV) promoter sequence. This promoter sequence is a strong constitutive promoter sequence capable of driving high levels of expression of any polynucleotide sequence operatively linked thereto. However, other constitutive promoter sequences may also be used, including, but not limited to the simian virus 40 (SV40) early promoter, mouse mammary tumor virus (MMTV), human immunodeficiency virus (HIV) long terminal repeat (LTR) promoter, MoMuLV promoter, an avian leukemia virus promoter, an Epstein-Barr virus immediate early promoter, a Rous sarcoma virus promoter, as well as human gene promoters such as, but not limited to, the actin promoter, the myosin promoter, the elongation factor-1α promoter, the hemoglobin promoter, and the creatine kinase promoter. Further, the invention should not be limited to the use of constitutive promoters. Inducible promoters are also contemplated as part of the invention. The use of an inducible promoter provides a molecular switch capable of turning on expression of the polynucleotide sequence which it is operatively linked when such expression is desired, or turning off the expression when expression is not desired. Examples of inducible promoters include, but are not limited to a metallothionine promoter, a glucocorticoid promoter, a progesterone promoter, and a tetracycline promoter.

[0327] Another example of a promoter is the phosphoglycerate kinase (PGK) promoter. In embodiments, a truncated PGK promoter (e.g., a PGK promoter with one or more, e.g., 1, 2, 5, 10, 100, 200, 300, or 400, nucleotide deletions when compared to the wild-type PGK promoter sequence) may be desired. The nucleotide sequences of exemplary PGK promoters are provided below.

WT PGK Promoter
(SEQ ID NO: 1473)
ACCCCTCTCTCCAGCCACTAAGCCAGTTGCTCCCTCGGCTGACGGCTGCA
CGCGAGGCCTCCGAACGTCTTACGCCTTGTGGCGCGCCCGTCCTTGTCCC
GGGTGTGATGGCGGGGTGTGGGGCGGAGGGCGTGGCGGGGAAGGGCCGGC
GACGAGAGCCGCGCGGGACGACTCGTCGGCGATAACCGGTGTCGGGTAGC
GCCAGCCGCGCGACGGTAACGAGGGACCGCGACAGGCAGACGCTCCCATG
ATCACTCTGCACGCCGAAGGCAAATAGTGCAGGCCGTGCGGCGCTTGGCG
TTCCTTGGAAGGGCTGAATCCCCGCCTCGTCCTTCGCAGCGGCCCCCCGG
GTGTTCCCATCGCCGCTTCTAGGCCCACTGCGACGCTTGCCTGCACTTCT
TACACGCTCTGGGTCCCAGCCGCGGCGACGCAAAGGGCCTTGGTGCGGGT
CTCGTCGGCGCAGGGACGCGTTTGGGTCCCGACGGAACCTTTTCCGCGTT
GGGGTTGGGGCACCATAAGCT
Exemplary truncated PGK Promoters:
PGK100:
(SEQ ID NO: 1474)
ACCCCTCTCTCCAGCCACTAAGCCAGTTGCTCCCTCGGCTGACGGCTGCA
CGCGAGGCCTCCGAACGTCTTACGCCTTGTGGCGCGCCCGTCCTTGTCCC
GGGTGTGATGGCGGGGTG
PGK200:
(SEQ ID NO: 1475)
ACCCCTCTCTCCAGCCACTAAGCCAGTTGCTCCCTCGGCTGACGGCTGCA
CGCGAGGCCTCCGAACGTCTTACGCCTTGTGGCGCGCCCGTCCTTGTCCC
GGGTGTGATGGCGGGGTGTGGGGCGGAGGGCGTGGCGGGGAAGGGCCGGC
GACGAGAGCCGCGCGGGACGACTCGTCGGCGATAACCGGTGTCGGGTAGC
GCCAGCCGCGCGACGGTAACG
PGK300:
(SEQ ID NO: 1476)
ACCCCTCTCTCCAGCCACTAAGCCAGTTGCTCCCTCGGCTGACGGCTGCA
CGCGAGGCCTCCGAACGTCTTACGCCTTGTGGCGCGCCCGTCCTTGTCCC
GGGTGTGATGGCGGGGTGTGGGGCGGAGGGCGTGGCGGGGAAGGGCCGGC
GACGAGAGCCGCGCGGGACGACTCGTCGGCGATAACCGGTGTCGGGTAGC
GCCAGCCGCGCGACGGTAACGAGGGACCGCGACAGGCAGACGCTCCCATG
ATCACTCTGCACGCCGAAGGCAAATAGTGCAGGCCGTGCGGCGCTTGGCG
TTCCTTGGAAGGGCTGAATCCCCG
PGK400:
(SEQ ID NO: 1477)
ACCCCTCTCTCCAGCCACTAAGCCAGTTGCTCCCTCGGCTGACGGCTGCA
CGCGAGGCCTCCGAACGTCTTACGCCTTGTGGCGCGCCCGTCCTTGTCCC
GGGTGTGATGGCGGGGTGTGGGGCGGAGGGCGTGGCGGGGAAGGGCCGGC
GACGAGAGCCGCGCGGGACGACTCGTCGGCGATAACCGGTGTCGGGTAGC
GCCAGCCGCGCGACGGTAACGAGGGACCGCGACAGGCAGACGCTCCCATG
ATCACTCTGCACGCCGAAGGCAAATAGTGCAGGCCGTGCGGCGCTTGGCG
TTCCTTGGAAGGGCTGAATCCCCGCCTCGTCCTTCGCAGCGGCCCCCCGG
GTGTTCCCATCGCCGCTTCTAGGCCCACTGCGACGCTTGCCTGCACTTCT
TACACGCTCTGGGTCCCAGCCG

[0328] A vector may also include, e.g., a signal sequence to facilitate secretion, a polyadenylation signal and transcription terminator (e.g., from Bovine Growth Hormone (BGH) gene), an element allowing episomal replication and replication in prokaryotes (e.g. SV40 origin and ColE1 or others known in the art) and/or elements to allow selection (e.g., ampicillin resistance gene and/or zeocin marker).

[0329] In order to assess the expression of a CAR IL-15R/IL-15 polypeptide or portions thereof, the expression vector to be introduced into a cell can also contain either a selectable marker gene or a reporter gene or both to facilitate identification and selection of expressing cells from the population of cells sought to be transfected or infected through viral vectors. In other aspects, the selectable marker may be carried on a separate piece of DNA and used in a co-transfection procedure. Both selectable markers and reporter genes may be flanked with appropriate regulatory sequences to enable expression in the host cells. Useful selectable markers include, for example, antibiotic-resistance genes, such as neo and the like.

[0330] Reporter genes are used for identifying potentially transfected cells and for evaluating the functionality of regulatory sequences. In general, a reporter gene is a gene that is not present in or expressed by the recipient organism or tissue and that encodes a polypeptide whose expression is manifested by some easily detectable property, e.g., enzymatic activity. Expression of the reporter gene is assayed at a suitable time after the DNA has been introduced into the recipient cells. Suitable reporter genes may include genes encoding luciferase, beta-galactosidase, chloramphenicol acetyl transferase, secreted alkaline phosphatase, or the green fluorescent protein gene (e.g., Ui-Tei et al., 2000 FEBS Letters 479: 79-82). Suitable expression systems are well known and may be prepared using known techniques or obtained commercially. In general, the construct with the minimal 5′ flanking region showing the highest level of expression of reporter gene is identified as the promoter. Such promoter regions may be linked to a reporter gene and used to evaluate agents for the ability to modulate promoter-driven transcription.

[0331] In one embodiment, the vector can further comprise a nucleic acid encoding a second CAR. In one embodiment, the second CAR includes an antigen binding domain to a target expressed on acute myeloid leukemia cells, such as, e.g., CD123, CD34, CLL-1, folate receptor beta, or FLT3; or a target expressed on a B cell, e.g., CD10, CD19, CD20, CD22, CD34, CD123, FLT-3, ROR1, CD79b, CD179b, or CD79a. In one embodiment, the vector comprises a nucleic acid sequence encoding a first CAR that specifically binds a first antigen and includes an intracellular signaling domain having a costimulatory signaling domain but not a primary signaling domain, and a nucleic acid encoding a second CAR that specifically binds a second, different, antigen and includes an intracellular signaling domain having a primary signaling domain but not a costimulatory signaling domain.

[0332] In one embodiment, the vector comprises a nucleic acid encoding a CAR IL-15R/IL-15 described herein and a nucleic acid encoding an inhibitory CAR. In one embodiment, the inhibitory CAR comprises an antigen binding domain that binds an antigen found on normal cells but not cancer cells. In one embodiment, the inhibitory CAR comprises the antigen binding domain, a transmembrane domain and an intracellular domain of an inhibitory molecule. For example, the intracellular domain of the inhibitory CAR can be an intracellular domain of PD1, PD-L1, PD-L2, CTLA4, TIM3, CEACAM (e.g., CEACAM-1, CEACAM-3 and/or CEACAM-5), LAG3, VISTA, BTLA, TIGIT, LAIR1, CD160, 2B4, CD80, CD86, B7-H3 (CD276), B7-H4 (VTCN1), HVEM (TNFRSF14 or CD270), KIR, A2aR, MHC class I, MHC class II, GAL9, adenosine, and TGF beta.

[0333] In embodiments, the vector may comprise two or more nucleic acid sequences encoding a CAR IL-15R/IL-15, e.g., a CAR IL-15R/IL-15 described herein and a second CAR, e.g., an inhibitory CAR or a CAR that specifically binds to a different antigen. In such embodiments, the two or more nucleic acid sequences encoding the CAR IL-15R/IL-15 are encoded by a single nucleic molecule in the same frame and as a single polypeptide chain. In this aspect, the two or more CARs, can, e.g., be separated by one or more peptide cleavage sites. (e.g., an auto-cleavage site or a substrate for an intracellular protease). Examples of peptide cleavage sites include the following, wherein the GSG residues are optional:

T2A:
(SEQ ID NO: 1478)
(GSG) E G R G S L L T C G D V E E N P G P
P2A:
(SEQ ID NO: 1479)
(GSG) A T N F S L L K Q A G D V E E N P G P
E2A:
(SEQ ID NO: 1480)
(GSG) Q C T N Y A L L K L A G D V E S N P G P
F2A:
(SEQ ID NO: 1481)
(GSG) V K Q T L N F D L L K L A G D V E S N P G P

[0334] Methods of introducing and expressing genes into a cell are known in the art. In the context of an expression vector, the vector can be readily introduced into a host cell, e.g., mammalian, bacterial, yeast, or insect cell by any method in the art. For example, the expression vector can be transferred into a host cell by physical, chemical, or biological means.

[0335] Physical methods for introducing a polynucleotide into a host cell include calcium phosphate precipitation, lipofection, particle bombardment, microinjection, electroporation, and the like. Methods for producing cells comprising vectors and/or exogenous nucleic acids are well-known in the art. See, for example, Sambrook et al., 2012, MOLECULAR CLONING: A LABORATORY MANUAL, volumes 1-4, Cold Spring Harbor Press, NY). A preferred method for the introduction of a polynucleotide into a host cell is calcium phosphate transfection

[0336] Biological methods for introducing a polynucleotide of interest into a host cell include the use of DNA and RNA vectors. Viral vectors, and especially retroviral vectors, have become the most widely used method for inserting genes into mammalian, e.g., human cells. Other viral vectors can be derived from lentivirus, poxviruses, herpes simplex virus I, adenoviruses and adeno-associated viruses, and the like. See, for example, U.S. Pat. Nos. 5,350,674 and 5,585,362.

[0337] Chemical means for introducing a polynucleotide into a host cell include colloidal dispersion systems, such as macromolecule complexes, nanocapsules, microspheres, beads, and lipid-based systems including oil-in-water emulsions, micelles, mixed micelles, and liposomes. An exemplary colloidal system for use as a delivery vehicle in vitro and in vivo is a liposome (e.g., an artificial membrane vesicle). Other methods of state-of-the-art targeted delivery of nucleic acids are available, such as delivery of polynucleotides with targeted nanoparticles or other suitable sub-micron sized delivery system.

[0338] In the case where a non-viral delivery system is utilized, an exemplary delivery vehicle is a liposome. The use of lipid formulations is contemplated for the introduction of the nucleic acids into a host cell (in vitro, ex vivo or in vivo). In another aspect, the nucleic acid may be associated with a lipid. The nucleic acid associated with a lipid may be encapsulated in the aqueous interior of a liposome, interspersed within the lipid bilayer of a liposome, attached to a liposome via a linking molecule that is associated with both the liposome and the oligonucleotide, entrapped in a liposome, complexed with a liposome, dispersed in a solution containing a lipid, mixed with a lipid, combined with a lipid, contained as a suspension in a lipid, contained or complexed with a micelle, or otherwise associated with a lipid. Lipid, lipid/DNA or lipid/expression vector associated compositions are not limited to any particular structure in solution. For example, they may be present in a bilayer structure, as micelles, or with a “collapsed” structure. They may also simply be interspersed in a solution, possibly forming aggregates that are not uniform in size or shape. Lipids are fatty substances which may be naturally occurring or synthetic lipids. For example, lipids include the fatty droplets that naturally occur in the cytoplasm as well as the class of compounds which contain long-chain aliphatic hydrocarbons and their derivatives, such as fatty acids, alcohols, amines, amino alcohols, and aldehydes.

[0339] Lipids suitable for use can be obtained from commercial sources. For example, dimyristyl phosphatidylcholine (“DMPC”) can be obtained from Sigma, St. Louis, Mo.; dicetyl phosphate (“DCP”) can be obtained from K & K Laboratories (Plainview, N.Y.); cholesterol (“Choi”) can be obtained from Calbiochem-Behring; dimyristyl phosphatidylglycerol (“DMPG”) and other lipids may be obtained from Avanti Polar Lipids, Inc. (Birmingham, Ala.). Stock solutions of lipids in chloroform or chloroform/methanol can be stored at about −20° C. Chloroform is used as the only solvent since it is more readily evaporated than methanol. “Liposome” is a generic term encompassing a variety of single and multilamellar lipid vehicles formed by the generation of enclosed lipid bilayers or aggregates. Liposomes can be characterized as having vesicular structures with a phospholipid bilayer membrane and an inner aqueous medium. Multilamellar liposomes have multiple lipid layers separated by aqueous medium. They form spontaneously when phospholipids are suspended in an excess of aqueous solution. The lipid components undergo self-rearrangement before the formation of closed structures and entrap water and dissolved solutes between the lipid bilayers (Ghosh et al., 1991 Glycobiology 5: 505-10). However, compositions that have different structures in solution than the normal vesicular structure are also encompassed. For example, the lipids may assume a micellar structure or merely exist as nonuniform aggregates of lipid molecules. Also contemplated are lipofectamine-nucleic acid complexes.

[0340] Regardless of the method used to introduce exogenous nucleic acids into a host cell or otherwise expose a cell to the inhibitor of the present invention, in order to confirm the presence of the recombinant DNA sequence in the host cell, a variety of assays may be performed. Such assays include, for example, “molecular biological” assays well known to those of skill in the art, such as Southern and Northern blotting, RT-PCR and PCR; “biochemical” assays, such as detecting the presence or absence of a particular peptide, e.g., by immunological means (ELISAs and Western blots) or by assays described herein to identify agents falling within the scope of the invention.

[0341] The present invention further provides a vector comprising a CAR IL-15R/IL-15 encoding nucleic acid molecule. In one aspect, a CAR IL-15R/IL-15 vector can be directly transduced into a cell, e.g., a T cell or NK cell. In one aspect, the vector is a cloning or expression vector, e.g., a vector including, but not limited to, one or more plasmids (e.g., expression plasmids, cloning vectors, minicircles, minivectors, double minute chromosomes), retroviral and lentiviral vector constructs. In some embodiments, the vector is a multicistronic vector. In one aspect, the vector is capable of expressing the CAR IL-15R/IL-15 construct in mammalian T cells or NK cells. In one aspect, the mammalian T cell is a human T cell. In one aspect, the mammalian NK cell is a human NK cell.

### Sources of Cells

[0342] Prior to expansion and genetic modification, a source of cells, e.g., immune effector cells (e.g., T cells or NK cells), is obtained from a subject. The term “subject” is intended to include living organisms in which an immune response can be elicited (e.g., mammals). Examples of subjects include humans, dogs, cats, mice, rats, and transgenic species thereof. T cells can be obtained from a number of sources, including peripheral blood mononuclear cells, bone marrow, lymph node tissue, cord blood, thymus tissue, tissue from a site of infection, ascites, pleural effusion, spleen tissue, and tumors.

[0343] In certain aspects of the present invention, any number of immune effector cell (e.g., T cell or NK cell) lines available in the art, may be used. In certain aspects of the present invention, T cells can be obtained from a unit of blood collected from a subject using any number of techniques known to the skilled artisan, such as Ficoll™ separation. In one preferred aspect, cells from the circulating blood of an individual are obtained by apheresis. The apheresis product typically contains lymphocytes, including T cells, monocytes, granulocytes, B cells, other nucleated white blood cells, red blood cells, and platelets. In one aspect, the cells collected by apheresis may be washed to remove the plasma fraction and to place the cells in an appropriate buffer or media for subsequent processing steps. In one aspect of the invention, the cells are washed with phosphate buffered saline (PBS). In an alternative aspect, the wash solution lacks calcium and may lack magnesium or may lack many if not all divalent cations.

[0344] Initial activation steps in the absence of calcium can lead to magnified activation. As those of ordinary skill in the art would readily appreciate a washing step may be accomplished by methods known to those in the art, such as by using a semi-automated “flow-through” centrifuge (for example, the Cobe 2991 cell processor, the Baxter CytoMate, or the Haemonetics Cell Saver 5) according to the manufacturer's instructions. After washing, the cells may be resuspended in a variety of biocompatible buffers, such as, for example, Ca-free, Mg-free PBS, PlasmaLyte A, or other saline solution with or without buffer. Alternatively, the undesirable components of the apheresis sample may be removed and the cells directly resuspended in culture media.

[0345] It is recognized that the methods of the application can utilize culture media conditions comprising 5% or less, for example 2%, human AB serum, and employ known culture media conditions and compositions, for example those described in Smith et al., “Ex vivo expansion of human T cells for adoptive immunotherapy using the novel Xeno-free CTS Immune Cell Serum Replacement” Clinical & Translational Immunology (2015) 4, e31; doi:10.1038/cti.2014.31.

[0346] In one aspect, T cells are isolated from peripheral blood lymphocytes by lysing the red blood cells and depleting the monocytes, for example, by centrifugation through a PERCOLL™ gradient or by counterflow centrifugal elutriation. A specific subpopulation of T cells, such as CD3+, CD4+, CD8+, CD45RA+, and/or CD45RO+T cells, can be further isolated by positive or negative selection techniques. For example, in one aspect, T cells are isolated by incubation with anti-CD3/anti-CD28 (e.g., 3×28)-conjugated beads, such as DYNABEADS® M-450 CD3/CD28 T, for a time period sufficient for positive selection of the desired T cells. In one aspect, the time period is about 30 minutes. In a further aspect, the time period ranges from 30 minutes to 36 hours or longer and all integer values there between. In a further aspect, the time period is at least 1, 2, 3, 4, 5, or 6 hours. In yet another preferred aspect, the time period is 10 to 24 hours. In one aspect, the incubation time period is 24 hours. Longer incubation times may be used to isolate T cells in any situation where there are few T cells as compared to other cell types, such in isolating tumor infiltrating lymphocytes (TIL) from tumor tissue or from immunocompromised individuals. Further, use of longer incubation times can increase the efficiency of capture of CD8+ T cells. Thus, by simply shortening or lengthening the time T cells are allowed to bind to the CD3/CD28 beads and/or by increasing or decreasing the ratio of beads to T cells (as described further herein), subpopulations of T cells can be preferentially selected for or against at culture initiation or at other time points during the process. Additionally, by increasing or decreasing the ratio of anti-CD3 and/or anti-CD28 antibodies on the beads or other surface, subpopulations of T cells can be preferentially selected for or against at culture initiation or at other desired time points. The skilled artisan would recognize that multiple rounds of selection can also be used in the context of this invention. In certain aspects, it may be desirable to perform the selection procedure and use the “unselected” cells in the activation and expansion process. “Unselected” cells can also be subjected to further rounds of selection.

[0347] Enrichment of a T cell population by negative selection can be accomplished with a combination of antibodies directed to surface markers unique to the negatively selected cells. One method is cell sorting and/or selection via negative magnetic immunoadherence or flow cytometry that uses a cocktail of monoclonal antibodies directed to cell surface markers present on the cells negatively selected. For example, to enrich for CD4+ cells by negative selection, a monoclonal antibody cocktail typically includes antibodies to CD14, CD20, CD11b, CD16, HLA-DR, and CD8. In certain aspects, it may be desirable to enrich for or positively select for regulatory T cells which typically express CD4+, CD25+, CD62Lhi, GITR+, and FoxP3+. In certain aspects, it may be desirable to enrich for cells that are CD127low. Alternatively, in certain aspects, T regulatory cells are depleted by anti-C25 conjugated beads or other similar method of selection.

[0348] The methods described herein can include, e.g., selection of a specific subpopulation of immune effector cells, e.g., T cells, that are a T regulatory cell-depleted population, CD25+ depleted cells, using, e.g., a negative selection technique, e.g., described herein. Preferably, the population of T regulatory depleted cells contains less than 30%, 25%, 20%, 15%, 10%, 5%, 4%, 3%, 2%, 1% of CD25+ cells.

[0349] In one embodiment, T regulatory cells, e.g., CD25+ T cells, are removed from the population using an anti-CD25 antibody, or fragment thereof, or a CD25-binding ligand, IL-2. In one embodiment, the anti-CD25 antibody, or fragment thereof, or CD25-binding ligand is conjugated to a substrate, e.g., a bead, or is otherwise coated on a substrate, e.g., a bead. In one embodiment, the anti-CD25 antibody, or fragment thereof, is conjugated to a substrate as described herein.

[0350] In one embodiment, the T regulatory cells, e.g., CD25+ T cells, are removed from the population using CD25 depletion reagent from Miltenyi™. In one embodiment, the ratio of cells to CD25 depletion reagent is 1e7 cells to 20 uL, or 1e7 cells to 15 uL, or 1e7 cells to 10 uL, or 1e7 cells to 5 uL, or 1e7 cells to 2.5 uL, or 1e7 cells to 1.25 uL. In one embodiment, e.g., for T regulatory cells, e.g., CD25+ depletion, greater than 500 million cells/ml is used. In a further aspect, a concentration of cells of 600, 700, 800, or 900 million cells/ml is used.

[0351] In one embodiment, the population of immune effector cells to be depleted includes about 6×10⁹ CD25+ T cells. In other aspects, the population of immune effector cells to be depleted include about 1×10⁹ to 1×10¹⁰ CD25+ T cell, and any integer value in between. In one embodiment, the resulting population T regulatory depleted cells has 2×10⁹ T regulatory cells, e.g., CD25+ cells, or less (e.g., 1×10⁹, 5×10⁸, 1×10⁸, 5×10⁷, 1×10⁷, or less CD25+ cells).

[0352] In one embodiment, the T regulatory cells, e.g., CD25+ cells, are removed from the population using the CliniMAC system with a depletion tubing set, such as, e.g., tubing 162-01. In one embodiment, the CliniMAC system is run on a depletion setting such as, e.g., DEPLETION2.1.

[0353] Without wishing to be bound by a particular theory, decreasing the level of negative regulators of immune cells (e.g., decreasing the number of unwanted immune cells, e.g., T_{REG} cells), in a subject prior to apheresis or during manufacturing of a CAR-expressing cell product can reduce the risk of subject relapse. For example, methods of depleting T_{REG} cells are known in the art. Methods of decreasing T_{REG} cells include, but are not limited to, cyclophosphamide, anti-GITR antibody (an anti-GITR antibody described herein), CD25-depletion, and combinations thereof.

[0354] In some embodiments, the manufacturing methods comprise reducing the number of (e.g., depleting) T_{REG} cells prior to manufacturing of the CAR-expressing cell. For example, manufacturing methods comprise contacting the sample, e.g., the apheresis sample, with an anti-GITR antibody and/or an anti-CD25 antibody (or fragment thereof, or a CD25-binding ligand), e.g., to deplete T_{REG} cells prior to manufacturing of the CAR-expressing cell (e.g., T cell, NK cell) product.

[0355] In an embodiment, a subject is pre-treated with one or more therapies that reduce T_{REG} cells prior to collection of cells for CAR-expressing cell product manufacturing, thereby reducing the risk of subject relapse to CAR-expressing cell treatment. In an embodiment, methods of decreasing T_{REG} cells include, but are not limited to, administration to the subject of one or more of cyclophosphamide, anti-GITR antibody, CD25-depletion, or a combination thereof. Administration of one or more of cyclophosphamide, anti-GITR antibody, CD25-depletion, or a combination thereof, can occur before, during or after an infusion of the CAR-expressing cell product.

[0356] In an embodiment, a subject is pre-treated with cyclophosphamide prior to collection of cells for CAR IL-15R/IL-15-expressing cell product manufacturing, thereby reducing the risk of subject relapse to CAR IL-15R/IL-15-expressing cell treatment. In an embodiment, a subject is pre-treated with an anti-GITR antibody prior to collection of cells for CAR IL-15R/IL-15-expressing cell product manufacturing, thereby reducing the risk of subject relapse to CAR IL-15R/IL-15-expressing cell treatment.

[0357] In one embodiment, the population of cells to be removed are neither the regulatory T cells or tumor cells, but cells that otherwise negatively affect the expansion and/or function of CAR IL-15R/IL-15 T cells, e.g. cells expressing CD14, CD11b, CD33, CD15, or other markers expressed by potentially immune suppressive cells. In one embodiment, such cells are envisioned to be removed concurrently with regulatory T cells and/or tumor cells, or following said depletion, or in another order.

[0358] The methods described herein can include more than one selection step, e.g., more than one depletion step. Enrichment of a T cell population by negative selection can be accomplished, e.g., with a combination of antibodies directed to surface markers unique to the negatively selected cells. One method is cell sorting and/or selection via negative magnetic immunoadherence or flow cytometry that uses a cocktail of monoclonal antibodies directed to cell surface markers present on the cells negatively selected. For example, to enrich for CD4+ cells by negative selection, a monoclonal antibody cocktail can include antibodies to CD14, CD20, CD11b, CD16, HLA-DR, and CD8.

[0359] The methods described herein can further include removing cells from the population which express a tumor antigen, e.g., a tumor antigen that does not comprise CD25, e.g., CD19, CD30, CD38, CD123, CD20, CD14 or CD11b, to thereby provide a population of T regulatory depleted, e.g., CD25+ depleted, and tumor antigen depleted cells that are suitable for expression of a CAR, e.g., a CAR described herein. In one embodiment, tumor antigen expressing cells are removed simultaneously with the T regulatory, e.g., CD25+ cells. For example, an anti-CD25 antibody, or fragment thereof, and an anti-tumor antigen antibody, or fragment thereof, can be attached to the same substrate, e.g., bead, which can be used to remove the cells or an anti-CD25 antibody, or fragment thereof, or the anti-tumor antigen antibody, or fragment thereof, can be attached to separate beads, a mixture of which can be used to remove the cells. In other embodiments, the removal of T regulatory cells, e.g., CD25+ cells, and the removal of the tumor antigen expressing cells is sequential, and can occur, e.g., in either order.

[0360] Also provided are methods that include removing cells from the population which express a check point inhibitor, e.g., a check point inhibitor described herein, e.g., one or more of PD1+ cells, LAG3+ cells, and TIM3+ cells, to thereby provide a population of T regulatory depleted, e.g., CD25+ depleted cells, and check point inhibitor depleted cells, e.g., PD1+, LAG3+ and/or TIM3+ depleted cells. Exemplary check point inhibitors include PD1, PD-L1, PD-L2, CTLA4, TIM3, CEACAM (e.g., CEACAM-1, CEACAM-3 and/or CEACAM-5), LAG3, VISTA, BTLA, TIGIT, LAIR1, CD160, 2B4, CD80, CD86, B7-H3 (CD276), B7-H4 (VTCN1), HVEM (TNFRSF14 or CD270), KIR, A2aR, MHC class I, MHC class II, GALS, adenosine, and TGF beta. In embodiments, the checkpoint inhibitor is PD1 or PD-L1. In one embodiment, check point inhibitor expressing cells are removed simultaneously with the T regulatory, e.g., CD25+ cells. For example, an anti-CD25 antibody, or fragment thereof, and an anti-check point inhibitor antibody, or fragment thereof, can be attached to the same bead which can be used to remove the cells, or an anti-CD25 antibody, or fragment thereof, and the anti-check point inhibitor antibody, or fragment there, can be attached to separate beads, a mixture of which can be used to remove the cells. In other embodiments, the removal of T regulatory cells, e.g., CD25+ cells, and the removal of the check point inhibitor expressing cells is sequential, and can occur, e.g., in either order.

[0361] In one embodiment, a T cell population can be selected that expresses one or more of IFN-γ, TNFα, IL-17A, IL-2, IL-3, IL-4, GM-CSF, IL-10, IL-13, granzyme B, and perforin, or other appropriate molecules, e.g., other cytokines. Methods for screening for cell expression can be determined, e.g., by the methods described in PCT Publication No.: WO 2013/126712.

[0362] For isolation of a desired population of cells by positive or negative selection, the concentration of cells and surface (e.g., particles such as beads) can be varied. In certain aspects, it may be desirable to significantly decrease the volume in which beads and cells are mixed together (e.g., increase the concentration of cells), to ensure maximum contact of cells and beads. For example, in one aspect, a concentration of 2 billion cells/ml is used. In one aspect, a concentration of 1 billion cells/ml is used. In a further aspect, greater than 100 million cells/ml is used. In a further aspect, a concentration of cells of 10, 15, 20, 25, 30, 35, 40, 45, or 50 million cells/ml is used. In yet one aspect, a concentration of cells from 75, 80, 85, 90, 95, or 100 million cells/ml is used. In further aspects, concentrations of 125 or 150 million cells/ml can be used. Using high concentrations can result in increased cell yield, cell activation, and cell expansion. Further, use of high cell concentrations allows more efficient capture of cells that may weakly express target antigens of interest, such as CD28-negative T cells, or from samples where there are many tumor cells present (e.g., leukemic blood, tumor tissue, etc.). Such populations of cells may have therapeutic value and would be desirable to obtain. For example, using high concentration of cells allows more efficient selection of CD8+ T cells that normally have weaker CD28 expression.

[0363] In a related aspect, it may be desirable to use lower concentrations of cells. By significantly diluting the mixture of T cells and surface (e.g., particles such as beads), interactions between the particles and cells is minimized. This selects for cells that express high amounts of desired antigens to be bound to the particles. For example, CD4+ T cells express higher levels of CD28 and are more efficiently captured than CD8+ T cells in dilute concentrations. In one aspect, the concentration of cells used is 5×10e6/ml. In other aspects, the concentration used can be from about 1×10⁵/ml to 1×10⁶/ml, and any integer value in between.

[0364] In other aspects, the cells may be incubated on a rotator for varying lengths of time at varying speeds at either 2-10° C. or at room temperature.

[0365] T cells for stimulation can also be frozen after a washing step. Wishing not to be bound by theory, the freeze and subsequent thaw step provides a more uniform product by removing granulocytes and to some extent monocytes in the cell population. After the washing step that removes plasma and platelets, the cells may be suspended in a freezing solution. While many freezing solutions and parameters are known in the art and will be useful in this context, one method involves using PBS containing 20% DMSO and 8% human serum albumin, or culture media containing 10% Dextran 40 and 5% Dextrose, 20% Human Serum Albumin and 7.5% DMSO, or 31.25% Plasmalyte-A, 31.25% Dextrose 5%, 0.45% NaCl, 10% Dextran 40 and 5% Dextrose, 20% Human Serum Albumin, and 7.5% DMSO or other suitable cell freezing media containing for example, Hespan and PlasmaLyte A, the cells then are frozen to −80° C. at a rate of 1° per minute and stored in the vapor phase of a liquid nitrogen storage tank. Other methods of controlled freezing may be used as well as uncontrolled freezing immediately at −20° C. or in liquid nitrogen.

[0366] In certain aspects, cryopreserved cells are thawed and washed as described herein and allowed to rest for one hour at room temperature prior to activation using the methods of the present invention.

[0367] Also contemplated in the context of the invention is the collection of blood samples or apheresis product from a subject at a time period prior to when the expanded cells as described herein might be needed. As such, the source of the cells to be expanded can be collected at any time point necessary, and desired cells, such as immune effector cells, e.g., T cells or NK cells, isolated and frozen for later use in cell therapy, e.g., T cell therapy, for any number of diseases or conditions that would benefit from cell therapy, e.g., T cell therapy, such as those described herein. In one aspect a blood sample or an apheresis is taken from a generally healthy subject. In certain aspects, a blood sample or an apheresis is taken from a generally healthy subject who is at risk of developing a disease, but who has not yet developed a disease, and the cells of interest are isolated and frozen for later use. In certain aspects, the immune effector cells (e.g., T cells or NK cells) may be expanded, frozen, and used at a later time. In certain aspects, samples are collected from a patient shortly after diagnosis of a particular disease as described herein but prior to any treatments. In a further aspect, the cells are isolated from a blood sample or an apheresis from a subject prior to any number of relevant treatment modalities, including but not limited to treatment with agents such as natalizumab, efalizumab, antiviral agents, chemotherapy, radiation, immunosuppressive agents, such as cyclosporin, azathioprine, methotrexate, mycophenolate, and FK506, antibodies, or other immunoablative agents such as CAMPATH, anti-CD3 antibodies, cytoxan, fludarabine, cyclosporin, FK506, rapamycin, mycophenolic acid, steroids, FR901228, and irradiation.

[0368] In a further aspect of the present invention, T cells are obtained from a patient directly following treatment that leaves the subject with functional T cells. In this regard, it has been observed that following certain cancer treatments, in particular treatments with drugs that damage the immune system, shortly after treatment during the period when patients would normally be recovering from the treatment, the quality of T cells obtained may be optimal or improved for their ability to expand ex vivo. Likewise, following ex vivo manipulation using the methods described herein, these cells may be in a preferred state for enhanced engraftment and in vivo expansion. Thus, it is contemplated within the context of the present invention to collect blood cells, including T cells, dendritic cells, or other cells of the hematopoietic lineage, during this recovery phase. Further, in certain aspects, mobilization (for example, mobilization with GM-CSF) and conditioning regimens can be used to create a condition in a subject wherein repopulation, recirculation, regeneration, and/or expansion of particular cell types is favored, especially during a defined window of time following therapy. Illustrative cell types include T cells, B cells, dendritic cells, and other cells of the immune system.

[0369] In one embodiment, the immune effector cells expressing a CAR IL-15R/IL-15 molecule, e.g., a CAR IL-15R/IL-15 molecule described herein, are obtained from a subject that has received a low, immune enhancing dose of an mTOR inhibitor. In an embodiment, the population of immune effector cells, e.g., T cells, to be engineered to express a CAR IL-15R/IL-15, are harvested after a sufficient time, or after sufficient dosing of the low, immune enhancing, dose of an mTOR inhibitor, such that the level of PD1 negative immune effector cells, e.g., T cells, or the ratio of PD1 negative immune effector cells, e.g., T cells/PD1 positive immune effector cells, e.g., T cells, in the subject or harvested from the subject has been, at least transiently, increased.

[0370] In other embodiments, population of immune effector cells, e.g., T cells, which have, or will be engineered to express a CAR IL-15R/IL-15, can be treated ex vivo by contact with an amount of an mTOR inhibitor that increases the number of PD1 negative immune effector cells, e.g., T cells or increases the ratio of PD1 negative immune effector cells, e.g., T cells/PD1 positive immune effector cells, e.g., T cells.

[0371] In one embodiment, a T cell population is diaglycerol kinase (DGK)-deficient. DGK-deficient cells include cells that do not express DGK RNA or protein, or have reduced or inhibited DGK activity. DGK-deficient cells can be generated by genetic approaches, e.g., administering RNA-interfering agents, e.g., siRNA, shRNA, miRNA, to reduce or prevent DGK expression. Alternatively, DGK-deficient cells can be generated by treatment with DGK inhibitors described herein.

[0372] In one embodiment, a T cell population is Ikaros-deficient. Ikaros-deficient cells include cells that do not express Ikaros RNA or protein, or have reduced or inhibited Ikaros activity, Ikaros-deficient cells can be generated by genetic approaches, e.g., administering RNA-interfering agents, e.g., siRNA, shRNA, miRNA, to reduce or prevent Ikaros expression. Alternatively, Ikaros-deficient cells can be generated by treatment with Ikaros inhibitors, e.g., lenalidomide.

[0373] In embodiments, a T cell population is DGK-deficient and Ikaros-deficient, e.g., does not express DGK and Ikaros, or has reduced or inhibited DGK and Ikaros activity. Such DGK and Ikaros-deficient cells can be generated by any of the methods described herein.

[0374] In an embodiment, the NK cells are obtained from the subject. In another embodiment, the NK cells are an NK cell line, e.g., NK-92 cell line (Conkwest).

### Modifications of CAR Cells, Including Allogeneic CAR Cells

[0375] In embodiments described herein, the immune effector cell can be an allogeneic immune effector cell, e.g., T cell or NK cell. For example, the cell can be an allogeneic T cell, e.g., an allogeneic T cell lacking expression of a functional T cell receptor (TCR) and/or human leukocyte antigen (HLA), e.g., HLA class I and/or HLA class II, and/or beta-2 microglobulin (β₂m). Compositions of allogeneic CAR and methods thereof have been described in, e.g., pages 227-237 of WO 2016/014565, incorporated herein by reference in its entirety.

[0376] In some embodiments, a cell, e.g., a T cell or a NK cell, is modified to reduce the expression of a TCR, and/or HLA, and/or β₂m, and/or an inhibitory molecule described herein (e.g., PD1, PD-L1, PD-L2, CTLA4, TIM3, CEACAM (e.g., CEACAM-1, CEACAM-3 and/or CEACAM-5), LAG3, VISTA, BTLA, TIGIT, LAIR1, CD160, 2B4, CD80, CD86, B7-H3 (CD276), B7-H4 (VTCN1), HVEM (TNFRSF14 or CD270), KIR, A2aR, MHC class I, MHC class II, GALS, adenosine, and TGF beta), using, e.g., a method described herein, e.g., siRNA, shRNA, clustered regularly interspaced short palindromic repeats (CRISPR) transcription-activator like effector nuclease (TALEN), or zinc finger endonuclease (ZFN).

[0377] In some embodiments, a cell, e.g., a T cell or a NK cell is engineered to express a telomerase subunit, e.g., the catalytic subunit of telomerase, e.g., TERT, e.g., hTERT. In one embodiment, such modification improves persistence of the cell in a patient.

### Activation and Expansion of T Cells

[0378] T cells may be activated and expanded generally using methods as described, for example, in U.S. Pat. Nos. 6,352,694; 6,534,055; 6,905,680; 6,692,964; 5,858,358; 6,887,466; 6,905,681; 7,144,575; 7,067,318; 7,172,869; 7,232,566; 7,175,843; 5,883,223; 6,905,874; 6,797,514; 6,867,041; and U.S. Patent Application Publication No. 20060121005.

[0379] Generally, the T cells of the invention may be expanded by contact with a surface having attached thereto an agent that stimulates a CD3/TCR complex associated signal and a ligand that stimulates a costimulatory molecule on the surface of the T cells. In particular, T cell populations may be stimulated as described herein, such as by contact with an anti-CD3 antibody, or antigen-binding fragment thereof, or an anti-CD2 antibody immobilized on a surface, or by contact with a protein kinase C activator (e.g., bryostatin) in conjunction with a calcium ionophore. For co-stimulation of an accessory molecule on the surface of the T cells, a ligand that binds the accessory molecule is used. For example, a population of T cells can be contacted with an anti-CD3 antibody and an anti-CD28 antibody, under conditions appropriate for stimulating proliferation of the T cells. To stimulate proliferation of either CD4+ T cells or CD8+ T cells, an anti-CD3 antibody and an anti-CD28 antibody can be used. Examples of an anti-CD28 antibody include 9.3, B-T3, XR-CD28 (Diaclone, Besançon, France) can be used as can other methods commonly known in the art (Berg et al., Transplant Proc. 30(8):3975-3977, 1998; Haanen et al., J. Exp. Med. 190(9):13191328, 1999; Garland et al., J Immunol Meth. 227(1-2):53-63, 1999).

[0380] In certain aspects, the primary stimulatory signal and the costimulatory signal for the T cell may be provided by different protocols. For example, the agents providing each signal may be in solution or coupled to a surface. When coupled to a surface, the agents may be coupled to the same surface (i.e., in “cis” formation) or to separate surfaces (i.e., in “trans” formation). Alternatively, one agent may be coupled to a surface and the other agent in solution. In one aspect, the agent providing the costimulatory signal is bound to a cell surface and the agent providing the primary activation signal is in solution or coupled to a surface. In certain aspects, both agents can be in solution. In one aspect, the agents may be in soluble form, and then cross-linked to a surface, such as a cell expressing Fc receptors or an antibody or other binding agent which will bind to the agents. In this regard, see for example, U.S. Patent Application Publication Nos. 20040101519 and 20060034810 for artificial antigen presenting cells (aAPCs) that are contemplated for use in activating and expanding T cells in the present invention.

[0381] In one aspect, the two agents are immobilized on beads, either on the same bead, i.e., “cis,” or to separate beads, i.e., “trans.” By way of example, the agent providing the primary activation signal is an anti-CD3 antibody or an antigen-binding fragment thereof and the agent providing the costimulatory signal is an anti-CD28 antibody or antigen-binding fragment thereof; and both agents are co-immobilized to the same bead in equivalent molecular amounts. In one aspect, a 1:1 ratio of each antibody bound to the beads for CD4+ T cell expansion and T cell growth is used. In certain aspects of the present invention, a ratio of anti CD3:CD28 antibodies bound to the beads is used such that an increase in T cell expansion is observed as compared to the expansion observed using a ratio of 1:1. In one particular aspect an increase of from about 1 to about 3 fold is observed as compared to the expansion observed using a ratio of 1:1. In one aspect, the ratio of CD3:CD28 antibody bound to the beads ranges from 100:1 to 1:100 and all integer values there between. In one aspect of the present invention, more anti-CD28 antibody is bound to the particles than anti-CD3 antibody, i.e., the ratio of CD3:CD28 is less than one. In certain aspects of the invention, the ratio of anti CD28 antibody to anti CD3 antibody bound to the beads is greater than 2:1. In one particular aspect, a 1:100 CD3:CD28 ratio of antibody bound to beads is used. In one aspect, a 1:75 CD3:CD28 ratio of antibody bound to beads is used. In a further aspect, a 1:50 CD3:CD28 ratio of antibody bound to beads is used. In one aspect, a 1:30 CD3:CD28 ratio of antibody bound to beads is used. In one preferred aspect, a 1:10 CD3:CD28 ratio of antibody bound to beads is used. In one aspect, a 1:3 CD3:CD28 ratio of antibody bound to the beads is used. In yet one aspect, a 3:1 CD3:CD28 ratio of antibody bound to the beads is used.

[0382] Ratios of particles to cells from 1:500 to 500:1 and any integer values in between may be used to stimulate T cells or other target cells. As those of ordinary skill in the art can readily appreciate, the ratio of particles to cells may depend on particle size relative to the target cell. For example, small sized beads could only bind a few cells, while larger beads could bind many. In certain aspects the ratio of cells to particles ranges from 1:100 to 100:1 and any integer values in-between and in further aspects the ratio comprises 1:9 to 9:1 and any integer values in between, can also be used to stimulate T cells. The ratio of anti-CD3- and anti-CD28-coupled particles to T cells that result in T cell stimulation can vary as noted above, however certain preferred values include 1:100, 1:50, 1:40, 1:30, 1:20, 1:10, 1:9, 1:8, 1:7, 1:6, 1:5, 1:4, 1:3, 1:2, 1:1, 2:1, 3:1, 4:1, 5:1, 6:1, 7:1, 8:1, 9:1, 10:1, and 15:1 with one preferred ratio being at least 1:1 particles per T cell. In one aspect, a ratio of particles to cells of 1:1 or less is used. In one particular aspect, a preferred particle:cell ratio is 1:5. In further aspects, the ratio of particles to cells can be varied depending on the day of stimulation. For example, in one aspect, the ratio of particles to cells is from 1:1 to 10:1 on the first day and additional particles are added to the cells every day or every other day thereafter for up to 10 days, at final ratios of from 1:1 to 1:10 (based on cell counts on the day of addition). In one particular aspect, the ratio of particles to cells is 1:1 on the first day of stimulation and adjusted to 1:5 on the third and fifth days of stimulation. In one aspect, particles are added on a daily or every other day basis to a final ratio of 1:1 on the first day, and 1:5 on the third and fifth days of stimulation. In one aspect, the ratio of particles to cells is 2:1 on the first day of stimulation and adjusted to 1:10 on the third and fifth days of stimulation. In one aspect, particles are added on a daily or every other day basis to a final ratio of 1:1 on the first day, and 1:10 on the third and fifth days of stimulation. One of skill in the art will appreciate that a variety of other ratios may be suitable for use in the present invention. In particular, ratios will vary depending on particle size and on cell size and type. In one aspect, the most typical ratios for use are in the neighborhood of 1:1, 2:1 and 3:1 on the first day.

[0383] In further aspects of the present invention, the cells, such as T cells, are combined with agent-coated beads, the beads and the cells are subsequently separated, and then the cells are cultured. In an alternative aspect, prior to culture, the agent-coated beads and cells are not separated but are cultured together. In a further aspect, the beads and cells are first concentrated by application of a force, such as a magnetic force, resulting in increased ligation of cell surface markers, thereby inducing cell stimulation.

[0384] By way of example, cell surface proteins may be ligated by allowing paramagnetic beads to which anti-CD3 and anti-CD28 are attached (3×28 beads) to contact the T cells. In one aspect the cells (for example, 10⁴ to 10⁹ T cells) and beads (for example, DYNABEADS® M-450 CD3/CD28 T paramagnetic beads at a ratio of 1:1) are combined in a buffer, for example PBS (without divalent cations such as, calcium and magnesium). Again, those of ordinary skill in the art can readily appreciate any cell concentration may be used. For example, the target cell may be very rare in the sample and comprise only 0.01% of the sample or the entire sample (i.e., 100%) may comprise the target cell of interest. Accordingly, any cell number is within the context of the present invention. In certain aspects, it may be desirable to significantly decrease the volume in which particles and cells are mixed together (i.e., increase the concentration of cells), to ensure maximum contact of cells and particles. For example, in one aspect, a concentration of about 10 billion cells/ml, 9 billion/ml, 8 billion/ml, 7 billion/ml, 6 billion/ml, 5 billion/ml, or 2 billion cells/ml is used. In one aspect, greater than 100 million cells/ml is used. In a further aspect, a concentration of cells of 10, 15, 20, 25, 30, 35, 40, 45, or 50 million cells/ml is used. In yet one aspect, a concentration of cells from 75, 80, 85, 90, 95, or 100 million cells/ml is used. In further aspects, concentrations of 125 or 150 million cells/ml can be used. Using high concentrations can result in increased cell yield, cell activation, and cell expansion. Further, use of high cell concentrations allows more efficient capture of cells that may weakly express target antigens of interest, such as CD28-negative T cells. Such populations of cells may have therapeutic value and would be desirable to obtain in certain aspects. For example, using high concentration of cells allows more efficient selection of CD8+ T cells that normally have weaker CD28 expression.

[0385] In one embodiment, cells transduced with a nucleic acid encoding a CAR IL-15R/IL-15, e.g., a CAR IL-15R/IL-15 described herein, are expanded, e.g., by a method described herein. In one embodiment, the cells are expanded in culture for a period of several hours (e.g., about 2, 3, 4, 5, 6, 7, 8, 9, 10, 15, 18, 21 hours) to about 14 days (e.g., 1, 2, 3, 4, 5, 6, 7, 8, 9, 10, 11, 12, 13 or 14 days). In one embodiment, the cells are expanded for a period of 4 to 9 days. In one embodiment, the cells are expanded for a period of 8 days or less, e.g., 7, 6 or 5 days. In one embodiment, the cells, e.g., a CAR IL-15R/IL-15 expressing cell described herein, are expanded in culture for 5 days, and the resulting cells are more potent than the same cells expanded in culture for 9 days under the same culture conditions. Potency can be defined, e.g., by various T cell functions, e.g. proliferation, target cell killing, cytokine production, activation, migration, or combinations thereof. In one embodiment, the cells, e.g., a CAR IL-15R/IL-15 expressing cell described herein, expanded for 5 days show at least a one, two, three or four fold increase in cells doublings upon antigen stimulation as compared to the same cells expanded in culture for 9 days under the same culture conditions. In one embodiment, the cells, e.g., the cells expressing a CAR IL-15R/IL-15 described herein, are expanded in culture for 5 days, and the resulting cells exhibit higher proinflammatory cytokine production, e.g., IFN-γ and/or GM-CSF levels, as compared to the same cells expanded in culture for 9 days under the same culture conditions. In one embodiment, the cells, e.g., a CAR IL-15R/IL-15 expressing cell described herein, expanded for 5 days show at least a one, two, three, four, five, ten fold or more increase in pg/ml of proinflammatory cytokine production, e.g., IFN-γ and/or GM-CSF levels, as compared to the same cells expanded in culture for 9 days under the same culture conditions.

[0386] In one aspect of the present invention, the mixture may be cultured for several hours (about 3 hours) to about 14 days or any hourly integer value in between. In one aspect, the mixture may be cultured for 21 days. In one aspect of the invention the beads and the T cells are cultured together for about eight days. In one aspect, the beads and T cells are cultured together for 2-3 days. Several cycles of stimulation may also be desired such that culture time of T cells can be 60 days or more. Conditions appropriate for T cell culture include an appropriate media (e.g., Minimal Essential Media or RPMI Media 1640 or, X-vivo 15, (Lonza)) that may contain factors necessary for proliferation and viability, including serum (e.g., fetal bovine or human serum), interleukin-2 (IL-2), insulin, IFN-γ, IL-4, IL-7, GM-CSF, IL-10, IL-12, IL-15, TGFβ, and TNF-α or any other additives for the growth of cells known to the skilled artisan. Other additives for the growth of cells include, but are not limited to, surfactant, plasmanate, and reducing agents such as N-acetyl-cysteine and 2-mercaptoethanol. Media can include RPMI 1640, AIM-V, DMEM, MEM, α-MEM, F-12, X-Vivo 15, and X-Vivo 20, Optimizer, with added amino acids, sodium pyruvate, and vitamins, either serum-free or supplemented with an appropriate amount of serum (or plasma) or a defined set of hormones, and/or an amount of cytokine(s) sufficient for the growth and expansion of T cells. Antibiotics, e.g., penicillin and streptomycin, are included only in experimental cultures, not in cultures of cells that are to be infused into a subject. The target cells are maintained under conditions necessary to support growth, for example, an appropriate temperature (e.g., 37° C.) and atmosphere (e.g., air plus 5% CO₂).

[0387] In one embodiment, the cells are expanded in an appropriate media (e.g., media described herein) that includes one or more interleukin that result in at least a 200-fold (e.g., 200-fold, 250-fold, 300-fold, 350-fold) increase in cells over a 14 day expansion period, e.g., as measured by a method described herein such as flow cytometry. In one embodiment, the cells are expanded in the presence of IL-15 and/or IL-7 (e.g., IL-15 and IL-7).

[0388] In embodiments, methods described herein, e.g., CAR IL-15R/IL-15-expressing cell manufacturing methods, comprise removing T regulatory cells, e.g., CD25+ T cells, from a cell population, e.g., using an anti-CD25 antibody, or fragment thereof, or a CD25-binding ligand, IL-2. Methods of removing T regulatory cells, e.g., CD25+ T cells, from a cell population are described herein. In embodiments, the methods, e.g., manufacturing methods, further comprise contacting a cell population (e.g., a cell population in which T regulatory cells, such as CD25+ T cells, have been depleted; or a cell population that has previously contacted an anti-CD25 antibody, fragment thereof, or CD25-binding ligand) with IL-15 and/or IL-7. For example, the cell population (e.g., that has previously contacted an anti-CD25 antibody, fragment thereof, or CD25-binding ligand) is expanded in the presence of IL-15 and/or IL-7.

[0389] In some embodiments a CAR-expressing cell described herein is contacted with a composition comprising a interleukin-15 (IL-15) polypeptide, a interleukin-15 receptor alpha (IL-15Ra) polypeptide, or a combination of both a IL-15 polypeptide and a IL-15Ra polypeptide e.g., hetIL-15, during the manufacturing of the CAR-expressing cell, e.g., ex vivo. In embodiments, a CAR-expressing cell described herein is contacted with a composition comprising a IL-15 polypeptide during the manufacturing of the CAR-expressing cell, e.g., ex vivo. In embodiments, a CAR-expressing cell described herein is contacted with a composition comprising a combination of both a IL-15 polypeptide and a IL-15 Ra polypeptide during the manufacturing of the CAR-expressing cell, e.g., ex vivo. In embodiments, a CAR-expressing cell described herein is contacted with a composition comprising hetIL-15 during the manufacturing of the CAR-expressing cell, e.g., ex vivo.

[0390] In one embodiment the CAR-expressing cell described herein is contacted with a composition comprising hetIL-15 during ex vivo expansion. In an embodiment, the CAR-expressing cell described herein is contacted with a composition comprising an IL-15 polypeptide during ex vivo expansion. In an embodiment, the CAR-expressing cell described herein is contacted with a composition comprising both an IL-15 polypeptide and an IL-15Ra polypeptide during ex vivo expansion. In one embodiment the contacting results in the survival and proliferation of a lymphocyte subpopulation, e.g., CD8+ T cells.

[0391] T cells that have been exposed to varied stimulation times may exhibit different characteristics. For example, typical blood or apheresed peripheral blood mononuclear cell products have a helper T cell population (TH, CD4+) that is greater than the cytotoxic or suppressor T cell population. Ex vivo expansion of T cells by stimulating CD3 and CD28 receptors produces a population of T cells that prior to about days 8-9 consists predominately of TH cells, while after about days 8-9, the population of T cells comprises an increasingly greater population of TC cells. Accordingly, depending on the purpose of treatment, infusing a subject with a T cell population comprising predominately of TH cells may be advantageous. Similarly, if an antigen-specific subset of TC cells has been isolated it may be beneficial to expand this subset to a greater degree.

[0392] Further, in addition to CD4 and CD8 markers, other phenotypic markers vary significantly, but in large part, reproducibly during the course of the cell expansion process. Thus, such reproducibility enables the ability to tailor an activated T cell product for specific purposes.

[0393] Once a CAR IL-15R/IL-15 is constructed, various assays can be used to evaluate the activity of the molecule, such as but not limited to, the ability to expand T cells following antigen stimulation, sustain T cell expansion in the absence of re-stimulation, and anti-cancer activities in appropriate in vitro and animal models. Assays to evaluate the effects of a CAR IL-15R/IL-15 are described in further detail below.

[0394] Western blot analysis of CAR expression in primary T cells can be used to detect the presence of monomers and dimers. See, e.g., Milone et al., Molecular Therapy 17(8): 1453-1464 (2009). Very briefly, T cells (1:1 mixture of CD4⁺ and CD8⁺ T cells) expressing the CARs are expanded in vitro for more than 10 days followed by lysis and SDS-PAGE under reducing conditions. CARs containing the full length TCR-ζ cytoplasmic domain and the endogenous TCR-ζ chain are detected by western blotting using an antibody to the TCR-chain. The same T cell subsets are used for SDS-PAGE analysis under non-reducing conditions to permit evaluation of covalent dimer formation.

[0395] In vitro expansion of CAR⁺ IL-15R/IL-15 T cells following antigen stimulation can be measured by flow cytometry. For example, a mixture of CD4⁺ and CD8⁺ T cells are stimulated with αCD3/αCD28 aAPCs followed by transduction with lentiviral vectors expressing GFP under the control of the promoters to be analyzed. Exemplary promoters include the CMV IE gene, EF-1α, ubiquitin C, or phosphoglycerokinase (PGK) promoters. GFP fluorescence is evaluated on day 6 of culture in the CD4⁺ and/or CD8⁺ T cell subsets by flow cytometry. See, e.g., Milone et al., Molecular Therapy 17(8): 1453-1464 (2009). Alternatively, a mixture of CD4⁺ and CD8⁺ T cells are stimulated with αCD3/αCD28 coated magnetic beads on day 0, and transduced with CAR IL-15R/IL-15 on day 1 using a multicistronic lentiviral vector expressing CAR IL-15R/IL-15 along with eGFP using a 2A ribosomal skipping sequence. Cultures are re-stimulated with antigen-expressing cells, such as multiple myeloma cell lines or K562 expressing the antigen, following washing. Exogenous IL-2 is added to the cultures every other day at 100 IU/ml. GFP⁺ T cells are enumerated by flow cytometry using bead-based counting. See, e.g., Milone et al., Molecular Therapy 17(8): 1453-1464 (2009).

[0396] Sustained CAR⁺ T cell expansion in the absence of re-stimulation can also be measured. See, e.g., Milone et al., Molecular Therapy 17(8): 1453-1464 (2009). Briefly, mean T cell volume (fl) is measured on day 8 of culture using a Coulter Multisizer III particle counter, a Nexcelom Cellometer Vision or Millipore Scepter, following stimulation with αCD3/αCD28 coated magnetic beads on day 0, and transduction with the indicated CAR IL-15R/IL-15 on day 1.

[0397] Animal models can also be used to measure a CART activity. For example, xenograft model using human antigen-specific CAR⁺ T cells to treat a primary human multiple myeloma in immunodeficient mice can be used. See, e.g., Milone et al., Molecular Therapy 17(8): 1453-1464 (2009). Very briefly, after establishment of MM, mice are randomized as to treatment groups. Different numbers of CAR IL-15R/IL-15 T cells can be injected into immunodeficient mice bearing MM. Animals are assessed for disease progression and tumor burden at weekly intervals. Survival curves for the groups are compared using the log-rank test. In addition, absolute peripheral blood CD4⁺ and CD8⁺ T cell counts 4 weeks following T cell injection in the immunodeficient mice can also be analyzed. Mice are injected with multiple myeloma cells and 3 weeks later are injected with T cells engineered to express CAR IL-15R/IL-15, e.g., by a multicistronic lentiviral vector that encodes the CAR IL-15R/IL-15 linked to eGFP. T cells are normalized to 45-50% input GFP⁺ T cells by mixing with mock-transduced cells prior to injection, and confirmed by flow cytometry Animals are assessed for leukemia at 1-week intervals. Survival curves for the CAR⁺ IL-15R/IL-15 T cell groups are compared using the log-rank test.

[0398] Assessment of cell proliferation and cytokine production has been previously described, e.g., at Milone et al., Molecular Therapy 17(8): 1453-1464 (2009). Briefly, assessment of CAR IL-15R/IL-15-mediated proliferation is performed in microtiter plates by mixing washed T cells with K562 cells expressing the antigen or other antigen-expressing myeloma cells are irradiated with gamma-radiation prior to use. Anti-CD3 (clone OKT3) and anti-CD28 (clone 9.3) monoclonal antibodies are added to cultures with KT32-BBL cells to serve as a positive control for stimulating T-cell proliferation since these signals support long-term CD8⁺ T cell expansion ex vivo. T cells are enumerated in cultures using CountBright™ fluorescent beads (Invitrogen, Carlsbad, Calif.) and flow cytometry as described by the manufacturer. CAR⁺ IL-15R/IL-15 T cells are identified by GFP expression using T cells that are engineered with eGFP-2A linked CAR-expressing lentiviral vectors. For CAR+ IL-15R/IL-15 T cells not expressing GFP, the CAR+ IL-15R/IL-15 T cells are detected with biotinylated recombinant antigen protein and a secondary avidin-PE conjugate. CD4+ and CD8⁺ expression on T cells are also simultaneously detected with specific monoclonal antibodies (BD Biosciences). Cytokine measurements are performed on supernatants collected 24 hours following re-stimulation using the human TH1/TH2 cytokine cytometric bead array kit (BD Biosciences, San Diego, Calif.) according the manufacturer's instructions. Fluorescence is assessed using a FACScalibur flow cytometer, and data is analyzed according to the manufacturer's instructions.

[0399] Cytotoxicity can be assessed by a standard 51Cr-release assay. See, e.g., Milone et al., Molecular Therapy 17(8): 1453-1464 (2009). Briefly, target cells (e.g., K562 lines expressing the antigen and primary multiple myeloma cells) are loaded with 51Cr (as NaCrO4, New England Nuclear, Boston, Mass.) at 37° C. for 2 hours with frequent agitation, washed twice in complete RPMI and plated into microtiter plates. Effector T cells are mixed with target cells in the wells in complete RPMI at varying ratios of effector cell:target cell (E:T). Additional wells containing media only (spontaneous release, SR) or a 1% solution of triton-X 100 detergent (total release, TR) are also prepared. After 4 hours of incubation at 37° C., supernatant from each well is harvested. Released 51Cr is then measured using a gamma particle counter (Packard Instrument Co., Waltham, Mass.). Each condition is performed in at least triplicate, and the percentage of lysis is calculated using the formula: % Lysis=(ER−SR)/(TR−SR), where ER represents the average 51Cr released for each experimental condition. Alternatively, cytotoxicity can also be assessed using a Bright-Glo™ Luciferase Assay.

[0400] Imaging technologies can be used to evaluate specific trafficking and proliferation of CAR IL-15R/IL-15 expressing cells in tumor-bearing animal models. Such assays have been described, for example, in Barrett et al., Human Gene Therapy 22:1575-1586 (2011). Briefly, NOD/SCID/γc^{-/-} (NSG) mice or other immunodeficient are injected IV with multiple myeloma cells followed 7 days later with CART cells 4 hour after electroporation with the CAR IL-15R/IL-15 constructs. The T cells are stably transfected with a lentiviral construct to express firefly luciferase, and mice are imaged for bioluminescence. Alternatively, therapeutic efficacy and specificity of a single injection of CAR⁺ IL-15R/IL-15 T cells in a multiple myeloma xenograft model can be measured as the following: NSG mice are injected with multiple myeloma cells transduced to stably express firefly luciferase, followed by a single tail-vein injection of T cells electroporated with CAR construct days later. Animals are imaged at various time points post injection. For example, photon-density heat maps of firefly luciferase positive tumors in representative mice at day 5 (2 days before treatment) and day 8 (24 hr post CAR⁺ PBLs) can be generated.

[0401] Alternatively, or in combination to the methods disclosed herein, methods and compositions for one or more of: detection and/or quantification of CAR IL-15R/IL-15-expressing cells (e.g., in vitro or in vivo (e.g., clinical monitoring)); immune cell expansion and/or activation; and/or CAR-specific selection, that involve the use of a CAR ligand, are disclosed. In one exemplary embodiment, the CAR ligand is an antibody that binds to the CAR molecule, e.g., binds to the extracellular antigen binding domain of CAR (e.g., an antibody that binds to the antigen binding domain, e.g., an anti-idiotypic antibody; or an antibody that binds to a constant region of the extracellular binding domain). In other embodiments, the CAR ligand is a CAR antigen molecule (e.g., a CAR antigen molecule as described herein).

[0402] In one aspect, a method for detecting and/or quantifying CAR IL-15R/IL-15 expressing cells is disclosed. For example, the CAR ligand can be used to detect and/or quantify CAR IL-15R/IL-15-expressing cells in vitro or in vivo (e.g., clinical monitoring of CAR-expressing cells in a patient, or dosing a patient). The method includes:

[0403] providing the CAR ligand (optionally, a labelled CAR ligand, e.g., a CAR ligand that includes a tag, a bead, a radioactive or fluorescent label);

[0404] acquiring the CAR IL-15R/IL-15-expressing cell (e.g., acquiring a sample containing CAR IL-15R/IL-15-expressing cells, such as a manufacturing sample or a clinical sample);

[0405] contacting the CAR IL-15R/IL-15-expressing cell with the CAR ligand under conditions where binding occurs, thereby detecting the level (e.g., amount) of the CAR-expressing cells present. Binding of the CAR IL-15R/IL-15-expressing cell with the CAR ligand can be detected using standard techniques such as FACS, ELISA and the like.

[0406] In another aspect, a method of expanding and/or activating cells (e.g., immune effector cells) is disclosed. The method includes:

[0407] providing a CAR IL-15R/IL-15-expressing cell (e.g., a first CAR IL-15R/IL-15-expressing cell or a transiently expressing CAR cell);

[0408] contacting said CAR IL-15R/IL-15-expressing cell with a CAR ligand, e.g., a CAR ligand as described herein), under conditions where immune cell expansion and/or proliferation occurs, thereby producing the activated and/or expanded cell population.

[0409] In certain embodiments, the CAR ligand is present on (e.g., is immobilized or attached to a substrate, e.g., a non-naturally occurring substrate). In some embodiments, the substrate is a non-cellular substrate. The non-cellular substrate can be a solid support chosen from, e.g., a plate (e.g., a microtiter plate), a membrane (e.g., a nitrocellulose membrane), a matrix, a chip or a bead. In embodiments, the CAR ligand is present in the substrate (e.g., on the substrate surface). The CAR ligand can be immobilized, attached, or associated covalently or non-covalently (e.g., cross-linked) to the substrate. In one embodiment, the CAR ligand is attached (e.g., covalently attached) to a bead. In the aforesaid embodiments, the immune cell population can be expanded in vitro or ex vivo. The method can further include culturing the population of immune cells in the presence of the ligand of the CAR molecule, e.g., using any of the methods described herein.

[0410] In other embodiments, the method of expanding and/or activating the cells further comprises addition of a second stimulatory molecule, e.g., CD28. For example, the CAR ligand and the second stimulatory molecule can be immobilized to a substrate, e.g., one or more beads, thereby providing increased cell expansion and/or activation.

[0411] In yet another aspect, a method for selecting or enriching for a CAR IL-15R/IL-15 expressing cell is provided. The method includes contacting the CAR IL-15R/IL-15 expressing cell with a CAR ligand as described herein; and selecting the cell on the basis of binding of the CAR ligand.

[0412] In yet other embodiments, a method for depleting, reducing and/or killing a CAR expressing cell is provided. The method includes contacting the CAR IL-15R/IL-15 expressing cell with a CAR ligand as described herein; and targeting the cell on the basis of binding of the CAR ligand, thereby reducing the number, and/or killing, the CAR IL-15R/IL-15-expressing cell. In one embodiment, the CAR ligand is coupled to a toxic agent (e.g., a toxin or a cell ablative drug). In another embodiment, the anti-idiotypic antibody can cause effector cell activity, e.g., ADCC or ADC activities.

[0413] Exemplary anti-CAR antibodies that can be used in the methods disclosed herein are described, e.g., in WO 2014/190273 and by Jena et al., “Chimeric Antigen Receptor (CAR)-Specific Monoclonal Antibody to Detect CD19-Specific T cells in Clinical Trials”, PLOS March 2013 8:3 e57838, the contents of which are incorporated by reference. In one embodiment, the anti-idiotypic antibody molecule recognizes an anti-CD19 antibody molecule, e.g., an anti-CD19 scFv. For instance, the anti-idiotypic antibody molecule can compete for binding with the CD19-specific CAR mAb clone no. 136.20.1 described in Jena et al., PLOS March 2013 8:3 e57838; may have the same CDRs (e.g., one or more of, e.g., all of, VH CDR1, VH CDR2, CH CDR3, VL CDR1, VL CDR2, and VL CDR3, using the Kabat definition, the Chothia definition, or a combination of the Kabat and Chothia definitions) as the CD19-specific CAR mAb clone no. 136.20.1; may have one or more (e.g., 2) variable regions as the CD19-specific CAR mAb clone no. 136.20.1, or may comprise the CD19-specific CAR mAb clone no. 136.20.1. In some embodiments, the anti-idiotypic antibody was made according to a method described in Jena et al. In another embodiment, the anti-idiotypic antibody molecule is an anti-idiotypic antibody molecule described in WO 2014/190273. In some embodiments, the anti-idiotypic antibody molecule has the same CDRs (e.g., one or more of, e.g., all of, VH CDR1, VH CDR2, CH CDR3, VL CDR1, VL CDR2, and VL CDR3) as an antibody molecule of WO 2014/190273 such as 136.20.1; may have one or more (e.g., 2) variable regions of an antibody molecule of WO 2014/190273, or may comprise an antibody molecule of WO 2014/190273 such as 136.20.1. In other embodiments, the anti-CAR antibody binds to a constant region of the extracellular binding domain of the CAR molecule, e.g., as described in WO 2014/190273. In some embodiments, the anti-CAR antibody binds to a constant region of the extracellular binding domain of the CAR molecule, e.g., a heavy chain constant region (e.g., a CH2-CH3 hinge region) or light chain constant region. For instance, in some embodiments the anti-CAR antibody competes for binding with the 2D3 monoclonal antibody described in WO 2014/190273, has the same CDRs (e.g., one or more of, e.g., all of, VH CDR1, VH CDR2, CH CDR3, VL CDR1, VL CDR2, and VL CDR3) as 2D3, or has one or more (e.g., 2) variable regions of 2D3, or comprises 2D3 as described in WO 2014/190273.

[0414] In some aspects and embodiments, the compositions and methods herein are optimized for a specific subset of T cells, e.g., as described in U.S. Ser. No. 62/031,699 filed Jul. 31, 2014, the contents of which are incorporated herein by reference in their entirety. In some embodiments, the optimized subsets of T cells display an enhanced persistence compared to a control T cell, e.g., a T cell of a different type (e.g., CD8⁺ or CD4⁺) expressing the same construct.

[0415] In some embodiments, a CD4⁺ T cell comprises a CAR IL-15R/IL-15 described herein, which CAR IL-15R/IL-15 comprises an intracellular signaling domain suitable for (e.g., optimized for, e.g., leading to enhanced persistence in) a CD4⁺ T cell, e.g., an ICOS domain. In some embodiments, a CD8⁺ T cell comprises a CAR IL-15R/IL-15 described herein, which CAR IL-15R/IL-15 comprises an intracellular signaling domain suitable for (e.g., optimized for, e.g., leading to enhanced persistence of) a CD8⁺ T cell, e.g., a 4-1BB domain, a CD28 domain, or another costimulatory domain other than an ICOS domain.

[0416] In an aspect, described herein is a method of treating a subject, e.g., a subject having cancer. The method includes administering to said subject, an effective amount of:

[0417] 1) a CD4⁺ T cell comprising a CAR IL-15R/IL-15 (the CAR^{CD4+})

[0418] comprising:

[0419] an antigen binding domain, e.g., an antigen binding domain described herein;

[0420] a transmembrane domain; and

[0421] an intracellular signaling domain, e.g., a first costimulatory domain, e.g., an ICOS domain; and

[0422] 2) a CD8⁺ T cell comprising a CAR IL-15R/IL-15 (the CAR^{CD8+}) comprising:

[0423] an antigen binding domain, e.g., an antigen binding domain described herein;

[0424] a transmembrane domain; and

[0425] an intracellular signaling domain, e.g., a second costimulatory domain, e.g., a 4-1BB domain, a CD28 domain, or another costimulatory domain other than an ICOS domain;

[0426] wherein the CAR^{CD4+} and the CAR^{CD8+} differ from one another.

[0427] Optionally, the method further includes administering:

[0428] 3) a second CD8+ T cell comprising a CAR IL-15R/IL-15 (the second CAR^{CD8+}) comprising:

[0429] an antigen binding domain, e.g., an antigen binding domain described herein;

[0430] a transmembrane domain; and

[0431] an intracellular signaling domain, wherein the second CAR^{CD8+} comprises an intracellular signaling domain, e.g., a costimulatory signaling domain, not present on the CAR^{CD8+}, and, optionally, does not comprise an ICOS signaling domain.

[0432] Other assays, including those that are known in the art can also be used to evaluate the CAR IL-15R/IL-15 constructs of the invention.

### IL-15 and IL-15 Receptor Molecules

[0433] In embodiments of any of the compositions or methods disclosed herein, the cytokine molecule is an IL-15 molecule, e.g., a full length, a fragment or a variant of IL-15, e.g., human IL-15. In embodiments, the IL-15 molecule is a wild-type, human IL-15, e.g., having the amino acid sequence of SEQ ID NO: 1007. In other embodiments, the IL-15 molecule is a variant of human IL-15, e.g., having one or more amino acid modifications compared to SEQ ID NO: 1007. In some embodiments, the IL-15 molecule comprises a mutation, e.g., an N72D point mutation as disclosed in Zhu X. et al., (2009) Journal of Immunology 183(6): 3598, the entire contents of which are hereby incorporated by reference.

Human Interleukin 15
(SEQ ID NO: 1007)

| | |
|---|---|
| 1 | MVLGTIDLCS CFSAGLPKTE ANWVNVISDL KKIEDLIQSM |
| | HIDATLYTES DVHPSCKVTA |
| 61 | MKCFLLELQV ISLESGDASI HDTVENLIIL ANNSLSSNGN |
| | VTESGCKECE ELEEKNIKEF |
| 121 | LQSFVHIVQM FINTS |

[0434] In embodiments of any of the compositions or methods disclosed herein, the IL-15 receptor molecule is an IL-15 receptor alpha (IL-15Ra), e.g., a full length, a fragment or a variant of IL-15Ra, e.g., human IL-15Ra. In embodiments, the IL-15Ra molecule is a wild-type, human IL-15Ra, e.g., having the amino acid sequence of SEQ ID NO: 1008. In other embodiments, the IL-15Ra molecule is a variant of human IL-15Ra, e.g., having one or more amino acid modifications compared to SEQ ID NO: 1008.

Human Interleukin 15 receptor alpha
(SEQ ID NO: 1008)

| | |
|---|---|
| 1 | MAPRRARGCR TLGLPALLLL LLLRPPATRG ITCPPPMSVE |
| | HADIWVKSYS LYSRERYICN |
| 61 | SGFKRKAGTS SLTECVLNKA TNVAHWTTPS LKCIRDPALV |
| | HQRPAPPSTV TTAGVTPQPE |
| 121 | SLSPSGKEPA ASSPSSNNTA ATTAAIVPGS QLMPSKSPST |
| | GTTEISSHES SHGTPSQTTA |
| 181 | KNWELTASAS HQPPGVYPQG HSDTTVAIST STVLLCGLSA |
| | VSLLACYLKS RQTPPLASVE |
| 241 | MEAMEALPVT WGTSSRDEDL ENCSHHL |

### IL-15/IL-15Ra Complexes

[0435] In certain embodiments, a combination described herein comprises an IL-15/IL-15Ra complex. In some embodiments, the IL-15/IL-15Ra complex is chosen from NIZ985 (Novartis), ATL-803 (Altor) or CYP0150 (Cytune). In some embodiments, the IL-15/IL-15RA complex is NIZ985. Without wishing to be bound by theory, it is believed that in some embodiments, IL-15 potentiates, e.g., enhances, Natural Killer cells to eliminate, e.g., kill, pancreatic cancer cells. In an embodiment, response, e.g., therapeutic response, to a combination described herein, e.g., a combination comprising an IL-15/IL15Ra complex, in, e.g., an animal model of colorectal cancer is associated with Natural Killer cell infiltration.

### Exemplary IL-15/IL-15Ra Complexes

[0436] In one embodiment, the IL-15/IL-15Ra complex comprises human IL-15 complexed with a soluble form of human IL-15Ra. The complex may comprise IL-15 covalently or noncovalently bound to a soluble form of IL-15Ra. In a particular embodiment, the human IL-15 is noncovalently bonded to a soluble form of IL-15Ra. In a particular embodiment, the human IL-15 of the composition comprises an amino acid sequence of SEQ ID NO: 1001 in Table 17 and the soluble form of human IL-15Ra comprises an amino acid sequence of SEQ ID NO:1002 in Table 17, as described in WO 2014/066527, incorporated by reference in its entirety. The molecules described herein can be made by vectors, host cells, and methods described in WO 2007/084342, incorporated by reference in its entirety.

TABLE 17
Amino acid and nucleotide sequences of
exemplary IL-15/IL-15Ra complexes
NIZ985

| | | |
|---|---|---|
| SEQ ID | Human | NWVNVISDLKKIEDLIQSMHIDATLYTESDVHPSC |
| NO: 1001 | IL-15 | KVTAMKCFLLELQVISLESGDASIHDTVENLIILA |
| | | NNSLSSNGNVTESGCKECEELEEKNIKEFLQSFVH |
| | | IVQMFINTS |
| SEQ ID | Human | ITCPPPMSVEHADIWVKSYSLYSRERYICNSGFKR |
| NO: 1002 | Soluble | KAGTSSLTECVLNKATNVAHWTTPSLKCIRDPALV |
| | IL-15Ra | HQRPAPPSTVTTAGVTPQPESLSPSGKEPAASSPS |
| | | SNNTAATTAAIVPGSQLMPSKSPSTGTTEISSHES |
| | | SHGTPSQTTAKNWELTASASHQPPGVYPQG |

[0437] Without wishing to be bound by theory, it is believed that in microsatellite stable CRCs with low T cell infiltration, IL-15 may promote, e.g., increase, T cell priming (e.g., as described in Lou, K. J. SciBX 7(16); 10.1038/SCIBX.2014.449). In some embodiments, the combination promotes, e.g., increases T cell priming Without wishing to be bound by theory, it is further believed that IL-15 may induce NK cell infiltration. In some embodiments, response to an IL-15/IL-15RA complex can result in NK cell infiltration.

### Other Exemplary IL-15/IL-15Ra Complexes

[0438] In one embodiment, the IL-15/IL-15Ra complex is ALT-803, an IL-15/IL-15Ra Fc fusion protein (IL-15N72D:IL-15RaSu/Fc soluble complex). ALT-803 is disclosed in WO 2008/143794, incorporated by reference in its entirety. In one embodiment, the IL-15/IL-15Ra Fc fusion protein comprises the sequences as disclosed in Table 18.

[0439] In one embodiment, the IL-15/IL-15Ra complex comprises IL-15 fused to the sushi domain of IL-15Ra (CYP0150, Cytune). The sushi domain of IL-15Ra refers to a domain beginning at the first cysteine residue after the signal peptide of IL-15Ra, and ending at the fourth cysteine residue after said signal peptide. The complex of IL-15 fused to the sushi domain of IL-15Ra is disclosed in WO 2007/04606 and WO 2012/175222, incorporated by reference in their entirety. In one embodiment, the IL-15/IL-15Ra sushi domain fusion comprises the sequences as disclosed in Table 18.

TABLE 18
Amino acid sequences of other exemplary IL-15/IL-15Ra complexes
ALT-803 (Altor)

| | | |
|---|---|---|
| SEQ ID NO: 1003 | IL-15N72D | NWVNVISDLKKIEDLIQSMHIDATLYTESDVHPSCKVTA |
| | | MKCFLLELQVISLESGDASIHDTVENLIILANDSLSSNGN |
| | | VTESGCKECEELEEKNIKEFLQSFVHIVQMFINTS |
| SEQ ID NO: 1004 | IL-15RaSu/ | ITCPPPMSVEHADIWVKSYSLYSRERYICNSGFKRKAGT |
| | Fc | SSLTECVLNKATNVAHWTTPSLKCIREPKSCDKTHTCPP |
| | | CPAPELLGGPSVFLFPPKPKDTLMISRTPEVTCVVVDVS |
| | | HEDPEVKFNWYVDGVEVHNAKTKPREEQYNSTYRVVS |
| | | VLTVLHQDWLNGKEYKCKVSNKALPAPIEKTISKAKGQ |
| | | PREPQVYTLPPSRDELTKNQVSLTCLVKGFYPSDIAVEW |
| | | ESNGQPENNYKTTPPVLDSDGSFFLYSKLTVDKSRWQQ |
| | | GNVFSCSVMHEALHNHYTQKSLSLSPGK |

IL-15/IL-15Ra sushi domain fusion (Cytune)

| | | |
|---|---|---|
| SEQ ID NO: 1005 | Human IL- | NWVNVISDLKKIEDLIQSMHIDATLYTESDVHPSCKVTA |
| | 15 | MKCFLLELQVISLESGDASIHDTVENLIILANNSLSSNGN |
| | | VTESGCKECEELEXKNIKEFLQSFVHIVQMFINTS |
| | | Where X is E or K |
| SEQ ID NO: 1006 | Human IL- | ITCPPPMSVEHADIWVKSYSLYSRERYICNSGFKRKAGT |
| | 15Ra sushi | SSLTECVLNKATNVAHWTTPSLKCIRDPALVHQRPAPP |
| | and hinge | |
| | domains | |

### Therapeutic Application

### Methods Using Biomarkers for Evaluating CAR-Effectiveness, Subject Suitability, or Sample Suitability

[0440] In another aspect, the invention features a method of evaluating or monitoring the effectiveness of a CAR-expressing cell therapy in a subject (e.g., a subject having a cancer). The method includes acquiring a value of effectiveness to the CAR IL-15R/IL-15 therapy, subject suitability, or sample suitability, wherein said value is indicative of the effectiveness or suitability of the CAR-expressing cell therapy.

[0441] In some embodiments of any of the methods disclosed herein, the subject is evaluated prior to receiving, during, or after receiving, the CAR IL-15R/IL-15-expressing cell therapy.

[0442] In some embodiments of any of the methods disclosed herein, a responder (e.g., a complete responder) has, or is identified as having, a greater level or activity of one, two, or more (all) of GZMK, PPF1BP2, or naïve T cells as compared to a non-responder.

[0443] In some embodiments of any of the methods disclosed herein, a non-responder has, or is identified as having, a greater level or activity of one, two, three, four, five, six, seven, or more (e.g., all) of IL22, IL-2RA, IL-21, IRF8, IL8, CCL17, CCL22, effector T cells, or regulatory T cells, as compared to a responder.

[0444] In an embodiment, a relapser is a patient having, or who is identified as having, an increased level of expression of one or more of (e.g., 2, 3, 4, or all of) the following genes, compared to non relapsers: MIR199A1, MIR1203, uc021ovp, ITM2C, and HLA-DQB1 and/or a decreased levels of expression of one or more of (e.g., 2, 3, 4, 5, 6, 7, 8, 9, 10, 11, or all of) the following genes, compared to non relapsers: PPIAL4D, TTTY10, TXLNG2P, MIR4650-1, KDM5D, USP9Y, PRKY, RPS4Y2, RPS4Y1, NCRNA00185, SULT1E1, and EIF1AY.

[0445] In some embodiments of any of the methods disclosed herein, a non-responder has, or is identified as having, a greater percentage of an immune cell exhaustion marker, e.g., one, two or more immune checkpoint inhibitors (e.g., PD-1, PD-L1, TIM-3 and/or LAG-3). In one embodiment, a non-responder has, or is identified as having, a greater percentage of PD-1, PD-L1, or LAG-3 expressing immune effector cells (e.g., CD4+ T cells and/or CD8+ T cells) (e.g., CAR-expressing CD4+ cells and/or CD8+ T cells) compared to the percentage of PD-1 or LAG-3 expressing immune effector cells from a responder.

[0446] In one embodiment, a non-responder has, or is identified as having, a greater percentage of immune cells having an exhausted phenotype, e.g., immune cells that co-express at least two exhaustion markers, e.g., co-expresses PD-1, PD-L1 and/or TIM-3. In other embodiments, a non-responder has, or is identified as having, a greater percentage of immune cells having an exhausted phenotype, e.g., immune cells that co-express at least two exhaustion markers, e.g., co-expresses PD-1 and LAG-3.

[0447] In some embodiments of any of the methods disclosed herein, a non-responder has, or is identified as having, a greater percentage of PD-1/PD-L1+/LAG-3+ cells in the CAR IL-15R/IL-15-expressing cell population compared to a responder (e.g., a complete responder) to the CAR-expressing cell therapy.

[0448] In some embodiments of any of the methods disclosed herein, a partial responder has, or is identified as having, a higher percentages of PD-1/PD-L1+/LAG-3+ cells, than a responder, in the CAR IL-15R/IL-15-expressing cell population.

[0449] In some embodiments of any of the methods disclosed herein, a non-responder has, or is identified as having, an exhausted phenotype of PD1/PD-L1+ CAR+ and co-expression of LAG3 in the CAR IL-15R/IL-15-expressing cell population.

[0450] In some embodiments of any of the methods disclosed herein, a non-responder has, or is identified as having, a greater percentage of PD-1/PD-L1+/TIM-3+ cells in the CAR-expressing cell population compared to the responder (e.g., a complete responder).

[0451] In some embodiments of any of the methods disclosed herein, a partial responders has, or is identified as having, a higher percentage of PD-1/PD-L1+/TIM-3+ cells, than responders, in the CAR IL-15R/IL-15-expressing cell population.

[0452] In some embodiments of any of the methods disclosed herein, the presence of CD8+ CD27+ CD45RO− T cells in an apheresis sample is a positive predictor of the subject response to a CAR IL-15R/IL-15-expressing cell therapy.

[0453] In some embodiments of any of the methods disclosed herein, a high percentage of PD1+ CAR+ and LAG3+ or TIM3+ T cells in an apheresis sample is a poor prognostic predictor of the subject response to a CAR IL-15R/IL-15-expressing cell therapy.

[0454] In some embodiments of any of the methods disclosed herein, the responder (e.g., the complete or partial responder) has one, two, three or more (or all) of the following profile:

[0455] (i) has a greater number of CD27+ immune effector cells compared to a reference value, e.g., a non-responder number of CD27+ immune effector cells;

[0456] (ii) has a greater number of CD8+ T cells compared to a reference value, e.g., a non-responder number of CD8+ T cells;

[0457] (iii) has a lower number of immune cells expressing one or more checkpoint inhibitors, e.g., a checkpoint inhibitor chosen from PD-1, PD-L1, LAG-3, TIM-3, or KLRG-1, or a combination, compared to a reference value, e.g., a non-responder number of cells expressing one or more checkpoint inhibitors; or

[0458] (iv) has a greater number of one, two, three, four or more (all) of resting T_{EFF} cells, resting T_{REG} cells, naïve CD4 cells, unstimulated memory cells or early memory T cells, or a combination thereof, compared to a reference value, e.g., a non-responder number of resting T_{EFF} cells, resting T_{REG} cells, naïve CD4 cells, unstimulated memory cells or early memory T cells.

[0459] In some embodiments of any of the methods disclosed herein, the cytokine level or activity is chosen from one, two, three, four, five, six, seven, eight, or more (or all) of cytokine CCL20/MIP3a, IL17A, IL6, GM-CSF, IFN-γ, IL10, IL13, IL2, IL21, IL4, IL5, IL9 or TNFα, or a combination thereof. The cytokine can be chosen from one, two, three, four or more (all) of IL-17a, CCL20, IL2, IL6, or TNFa. In one embodiment, an increased level or activity of a cytokine is chosen from one or both of IL-17a and CCL20, is indicative of increased responsiveness or decreased relapse.

[0460] In embodiments, the responder, a non-responder, a relapser or a non-relapser identified by the methods herein can be further evaluated according to clinical criteria. For example, a complete responder has, or is identified as, a subject having a disease, e.g., a cancer, who exhibits a complete response, e.g., a complete remission, to a treatment. A complete response may be identified, e.g., using the NCCN Guidelines®, or Cheson et al, J Clin Oncol 17:1244 (1999) and Cheson et al., “Revised Response Criteria for Malignant Lymphoma”, J Clin Oncol 25:579-586 (2007) (both of which are incorporated by reference herein in their entireties), as described herein. A partial responder has, or is identified as, a subject having a disease, e.g., a cancer, who exhibits a partial response, e.g., a partial remission, to a treatment. A partial response may be identified, e.g., using the NCCN Guidelines®, or Cheson criteria as described herein. A non-responder has, or is identified as, a subject having a disease, e.g., a cancer, who does not exhibit a response to a treatment, e.g., the patient has stable disease or progressive disease. A non-responder may be identified, e.g., using the NCCN Guidelines®, or Cheson criteria as described herein.

[0461] Alternatively, or in combination with the methods disclosed herein, responsive to said value, performing one, two, three four or more of:

[0462] administering e.g., to a responder or a non-relapser, a CAR IL-15R/IL-15-expressing cell therapy;

[0463] administered an altered dosing of a CAR IL-15R/IL-15-expressing cell therapy;

[0464] altering the schedule or time course of a CAR IL-15R/IL-15-expressing cell therapy;

[0465] administering, e.g., to a non-responder or a partial responder, an additional agent in combination with a CAR IL-15R/IL-15-expressing cell therapy, e.g., a checkpoint inhibitor, e.g., a checkpoint inhibitor described herein;

[0466] administering to a non-responder or partial responder a therapy that increases the number of younger T cells in the subject prior to treatment with a CAR IL-15R/IL-15-expressing cell therapy;

[0467] modifying a manufacturing process of a CAR IL-15R/IL-15-expressing cell therapy, e.g., enriching for younger T cells prior to introducing a nucleic acid encoding a CAR, or increasing the transduction efficiency, e.g., for a subject identified as a non-responder or a partial responder;

[0468] administering an alternative therapy, e.g., for a non-responder or partial responder or relapser; or

[0469] if the subject is, or is identified as, a non-responder or a relapser, decreasing the T_{REG} cell population and/or T_{REG} gene signature, e.g., by one or more of CD25 depletion, administration of cyclophosphamide, anti-GITR antibody, or a combination thereof.

[0470] In certain embodiments, the subject is pre-treated with an anti-GITR antibody. In certain embodiment, the subject is treated with an anti-GITR antibody prior to infusion or re-infusion.

### Combination Therapies

[0471] A CAR IL-15R/IL-15-expressing cell described herein may be used in combination with other known agents and therapies. Administered “in combination”, as used herein, means that two (or more) different treatments are delivered to the subject during the course of the subject's affliction with the disorder, e.g., the two or more treatments are delivered after the subject has been diagnosed with the disorder and before the disorder has been cured or eliminated or treatment has ceased for other reasons. In some embodiments, the delivery of one treatment is still occurring when the delivery of the second begins, so that there is overlap in terms of administration. This is sometimes referred to herein as “simultaneous” or “concurrent delivery”. In other embodiments, the delivery of one treatment ends before the delivery of the other treatment begins. In some embodiments of either case, the treatment is more effective because of combined administration. For example, the second treatment is more effective, e.g., an equivalent effect is seen with less of the second treatment, or the second treatment reduces symptoms to a greater extent, than would be seen if the second treatment were administered in the absence of the first treatment, or the analogous situation is seen with the first treatment. In some embodiments, delivery is such that the reduction in a symptom, or other parameter related to the disorder is greater than what would be observed with one treatment delivered in the absence of the other. The effect of the two treatments can be partially additive, wholly additive, or greater than additive. The delivery can be such that an effect of the first treatment delivered is still detectable when the second is delivered.

[0472] A CAR IL-15R/IL-15-expressing cell described herein and the at least one additional therapeutic agent can be administered simultaneously, in the same or in separate compositions, or sequentially. For sequential administration, the CAR-expressing cell described herein can be administered first, and the additional agent can be administered second, or the order of administration can be reversed.

[0473] The CAR IL-15R/IL-15 therapy and/or other therapeutic agents, procedures or modalities can be administered during periods of active disorder, or during a period of remission or less active disease. The CAR therapy can be administered before the other treatment, concurrently with the treatment, post-treatment, or during remission of the disorder.

[0474] When administered in combination, the CAR IL-15R/IL-15 therapy and the additional agent (e.g., second or third agent), or all, can be administered in an amount or dose that is higher, lower or the same than the amount or dosage of each agent used individually, e.g., as a monotherapy. In certain embodiments, the administered amount or dosage of the CAR IL-15R/IL-15 therapy, the additional agent (e.g., second or third agent), or all, is lower (e.g., at least 20%, at least 30%, at least 40%, or at least 50%) than the amount or dosage of each agent used individually, e.g., as a monotherapy. In other embodiments, the amount or dosage of the CAR IL-15R/IL-15 therapy, the additional agent (e.g., second or third agent), or all, that results in a desired effect (e.g., treatment of cancer) is lower (e.g., at least 20%, at least 30%, at least 40%, or at least 50% lower) than the amount or dosage of each agent used individually, e.g., as a monotherapy, required to achieve the same therapeutic effect.

[0475] In some embodiments, the invention discloses a combination therapy including a CAR IL-15R/IL-15-expressing cell therapy described herein, an RNA molecule described herein (or a nucleic acid molecule encoding the RNA molecule), and an additional therapeutic agent.

### PD-1 Inhibitor

[0476] In some embodiments, the additional therapeutic agent is a PD-1 inhibitor. In some embodiments, the PD-1 inhibitor is chosen from PDR001 (Novartis), Nivolumab (Bristol-Myers Squibb), Pembrolizumab (Merck & Co), Pidilizumab (CureTech), MEDI0680 (Medimmune), REGN2810 (Regeneron), TSR-042 (Tesaro), PF-06801591 (Pfizer), BGB-A317 (Beigene), BGB-108 (Beigene), INCSHR1210 (Incyte), or AMP-224 (Amplimmune).

[0477] In one embodiment, the PD-1 inhibitor is an anti-PD-1 antibody molecule. In one embodiment, the PD-1 inhibitor is an anti-PD-1 antibody molecule as described in US 2015/0210769, published on Jul. 30, 2015, entitled “Antibody Molecules to PD-1 and Uses Thereof,” incorporated by reference in its entirety. In one embodiment, the anti-PD-1 antibody molecule comprises the CDRs, variable regions, heavy chains and/or light chains of BAP049-Clone-E or BAP049-Clone-B disclosed in US 2015/0210769. The antibody molecules described herein can be made by vectors, host cells, and methods described in US 2015/0210769, incorporated by reference in its entirety.

[0478] In one embodiment, the anti-PD-1 antibody molecule is Nivolumab (Bristol-Myers Squibb), also known as MDX-1106, MDX-1106-04, ONO-4538, BMS-936558, or OPDIVO®. Nivolumab (clone 5C4) and other anti-PD-1 antibodies are disclosed in U.S. Pat. No. 8,008,449 and WO 2006/121168, incorporated by reference in their entirety. In one embodiment, the anti-PD-1 antibody molecule is Pembrolizumab (Merck & Co), also known as Lambrolizumab, MK-3475, MK03475, SCH-900475, or KEYTRUDA®. Pembrolizumab and other anti-PD-1 antibodies are disclosed in Hamid, O. et al. (2013) New England Journal of Medicine 369 (2): 134-44, U.S. Pat. No. 8,354,509, and WO 2009/114335, incorporated by reference in their entirety. In one embodiment, the anti-PD-1 antibody molecule is Pidilizumab (CureTech), also known as CT-011. Pidilizumab and other anti-PD-1 antibodies are disclosed in Rosenblatt, J. et al. (2011) J Immunotherapy 34(5): 409-18, U.S. Pat. Nos. 7,695,715, 7,332,582, and 8,686,119, incorporated by reference in their entirety. In one embodiment, the anti-PD-1 antibody molecule is MEDI0680 (Medimmune), also known as AMP-514. MEDI0680 and other anti-PD-1 antibodies are disclosed in U.S. Pat. No. 9,205,148 and WO 2012/145493, incorporated by reference in their entirety. In one embodiment, the anti-PD-1 antibody molecule is REGN2810 (Regeneron). In one embodiment, the anti-PD-1 antibody molecule is PF-06801591 (Pfizer). In one embodiment, the anti-PD-1 antibody molecule is BGB-A317 or BGB-108 (Beigene). In one embodiment, the anti-PD-1 antibody molecule is INCSHR1210 (Incyte), also known as INCSHR01210 or SHR-1210. In one embodiment, the anti-PD-1 antibody molecule is TSR-042 (Tesaro), also known as ANB011.

[0479] Further known anti-PD-1 antibody molecules include those described, e.g., in WO 2015/112800, WO 2016/092419, WO 2015/085847, WO 2014/179664, WO 2014/194302, WO 2014/209804, WO 2015/200119, U.S. Pat. Nos. 8,735,553, 7,488,802, 8,927,697, 8,993,731, and 9,102,727, incorporated by reference in their entirety.

[0480] In one embodiment, the PD-1 inhibitor is a peptide that inhibits the PD-1 signaling pathway, e.g., as described in U.S. Pat. No. 8,907,053, incorporated by reference in its entirety. In one embodiment, the PD-1 inhibitor is an immunoadhesin (e.g., an immunoadhesin comprising an extracellular or PD-1 binding portion of PD-L1 or PD-L2 fused to a constant region (e.g., an Fc region of an immunoglobulin sequence). In one embodiment, the PD-1 inhibitor is AMP-224 (B7-DCIg (Amplimmune), e.g., disclosed in WO 2010/027827 and WO 2011/066342, incorporated by reference in their entirety).

### PD-L1 Inhibitors

[0481] In some embodiments, the additional therapeutic agent is a PD-L1 inhibitor. In some embodiments, the PD-L1 inhibitor is chosen from FAZ053 (Novartis), Atezolizumab (Genentech/Roche), Avelumab (Merck Serono and Pfizer), Durvalumab (MedImmune/AstraZeneca), or BMS-936559 (Bristol-Myers Squibb).

[0482] In one embodiment, the PD-L1 inhibitor is an anti-PD-L1 antibody molecule. In one embodiment, the PD-L1 inhibitor is an anti-PD-L1 antibody molecule as disclosed in US 2016/0108123, published on Apr. 21, 2016, entitled “Antibody Molecules to PD-L1 and Uses Thereof,” incorporated by reference in its entirety. In one embodiment, the anti-PD-L1 antibody molecule comprises the CDRs, variable regions, heavy chains and/or light chains of BAP058-Clone O or BAP058-Clone N disclosed in US 2016/0108123.

[0483] In one embodiment, the anti-PD-L1 antibody molecule is Atezolizumab (Genentech/Roche), also known as MPDL3280A, RG7446, RO5541267, YW243.55.S70, or TECENTRIQ™. Atezolizumab and other anti-PD-L1 antibodies are disclosed in U.S. Pat. No. 8,217,149, incorporated by reference in its entirety. In one embodiment, the anti-PD-L1 antibody molecule is Avelumab (Merck Serono and Pfizer), also known as MSB0010718C. Avelumab and other anti-PD-L1 antibodies are disclosed in WO 2013/079174, incorporated by reference in its entirety. In one embodiment, the anti-PD-L1 antibody molecule is Durvalumab (MedImmune/AstraZeneca), also known as MEDI4736. Durvalumab and other anti-PD-L1 antibodies are disclosed in U.S. Pat. No. 8,779,108, incorporated by reference in its entirety. In one embodiment, the anti-PD-L1 antibody molecule is BMS-936559 (Bristol-Myers Squibb), also known as MDX-1105 or 12A4. BMS-936559 and other anti-PD-L1 antibodies are disclosed in U.S. Pat. No. 7,943,743 and WO 2015/081158, incorporated by reference in their entirety.

[0484] Further known anti-PD-L1 antibodies include those described, e.g., in WO 2015/181342, WO 2014/100079, WO 2016/000619, WO 2014/022758, WO 2014/055897, WO 2015/061668, WO 2013/079174, WO 2012/145493, WO 2015/112805, WO 2015/109124, WO 2015/195163, U.S. Pat. Nos. 8,168,179, 8,552,154, 8,460,927, and 9,175,082, incorporated by reference in their entirety.

### LAG-3 Inhibitors

[0485] In some embodiments, the additional therapeutic agent is a LAG-3 inhibitor. In some embodiments, the LAG-3 inhibitor is chosen from LAG525 (Novartis), BMS-986016 (Bristol-Myers Squibb), or TSR-033 (Tesaro).

[0486] In one embodiment, the LAG-3 inhibitor is an anti-LAG-3 antibody molecule. In one embodiment, the LAG-3 inhibitor is an anti-LAG-3 antibody molecule as disclosed in US 2015/0259420, published on Sep. 17, 2015, entitled “Antibody Molecules to LAG-3 and Uses Thereof,” incorporated by reference in its entirety. In one embodiment, the anti-LAG-3 antibody molecule comprises the CDRs, variable regions, heavy chains and/or light chains of BAP050-Clone I or BAP050-Clone J disclosed in US 2015/0259420.

[0487] In one embodiment, the anti-LAG-3 antibody molecule is BMS-986016 (Bristol-Myers Squibb), also known as BMS986016. BMS-986016 and other anti-LAG-3 antibodies are disclosed in WO 2015/116539 and U.S. Pat. No. 9,505,839, incorporated by reference in their entirety. In one embodiment, the anti-LAG-3 antibody molecule is TSR-033 (Tesaro). In one embodiment, the anti-LAG-3 antibody molecule is IMP731 or GSK2831781 (GSK and Prima BioMed). IMP731 and other anti-LAG-3 antibodies are disclosed in WO 2008/132601 and U.S. Pat. No. 9,244,059, incorporated by reference in their entirety. In one embodiment, the anti-LAG-3 antibody molecule is IMP761 (Prima BioMed).

[0488] Further known anti-LAG-3 antibodies include those described, e.g., in WO 2008/132601, WO 2010/019570, WO 2014/140180, WO 2015/116539, WO 2015/200119, WO 2016/028672, U.S. Pat. Nos. 9,244,059, 9,505,839, incorporated by reference in their entirety.

[0489] In one embodiment, the anti-LAG-3 inhibitor is a soluble LAG-3 protein, e.g., IMP321 (Prima BioMed), e.g., as disclosed in WO 2009/044273, incorporated by reference in its entirety.

### TIM-3 Inhibitors

[0490] In some embodiments, the additional therapeutic agent is a TIM-3 inhibitor. In some embodiments, the TIM-3 inhibitor is MGB453 (Novartis) or TSR-022 (Tesaro).

[0491] In one embodiment, the TIM-3 inhibitor is an anti-TIM-3 antibody molecule. In one embodiment, the TIM-3 inhibitor is an anti-TIM-3 antibody molecule as disclosed in US 2015/0218274, published on Aug. 6, 2015, entitled “Antibody Molecules to TIM-3 and Uses Thereof,” incorporated by reference in its entirety. In one embodiment, the anti-TIM-3 antibody molecule comprises the CDRs, variable regions, heavy chains and/or light chains of ABTIM3-hum11 or ABTIM3-hum03 disclosed in US 2015/0218274.

[0492] In one embodiment, the anti-TIM-3 antibody molecule is TSR-022 (AnaptysBio/Tesaro). In one embodiment, the anti-TIM-3 antibody molecule comprises one or more of the CDR sequences (or collectively all of the CDR sequences), the heavy chain or light chain variable region sequence, or the heavy chain or light chain sequence of APE5137 or APE5121. APE5137, APE5121, and other anti-TIM-3 antibodies are disclosed in WO 2016/161270, incorporated by reference in its entirety. In one embodiment, the anti-TIM-3 antibody molecule is the antibody clone F38-2E2.

[0493] Further known anti-TIM-3 antibodies include those described, e.g., in WO 2016/111947, WO 2016/071448, WO 2016/144803, U.S. Pat. Nos. 8,552,156, 8,841,418, and 9,163,087, incorporated by reference in their entirety.

### Chemotherapeutic Agents

[0494] In some embodiments, the additional therapeutic agent is a chemotherapeutic agent. Exemplary chemotherapeutic agents include an anthracycline (e.g., doxorubicin (e.g., liposomal doxorubicin)), a vinca alkaloid (e.g., vinblastine, vincristine, vindesine, vinorelbine), an alkylating agent (e.g., cyclophosphamide, decarbazine, melphalan, ifosfamide, temozolomide), an immune cell antibody (e.g., alemtuzamab, gemtuzumab, rituximab, tositumomab), an antimetabolite (including, e.g., folic acid antagonists, pyrimidine analogs, purine analogs and adenosine deaminase inhibitors (e.g., fludarabine)), an mTOR inhibitor, a TNFR glucocorticoid induced TNFR related protein (GITR) agonist, a proteasome inhibitor (e.g., aclacinomycin A, gliotoxin or bortezomib), an immunomodulator such as thalidomide or a thalidomide derivative (e.g., lenalidomide).

[0495] General Chemotherapeutic agents considered for use in combination therapies include anastrozole (Arimidex®), bicalutamide (Casodex®), bleomycin sulfate (Blenoxane®), busulfan (Myleran®), busulfan injection (Busulfex®), capecitabine (Xeloda®), N4-pentoxycarbonyl-5-deoxy-5-fluorocytidine, carboplatin (Paraplatin®), carmustine (BiCNU®), chlorambucil (Leukeran®), cisplatin (Platinol®), cladribine (Leustatin®), cyclophosphamide (Cytoxan® or Neosar®), cytarabine, cytosine arabinoside (Cytosar-U®), cytarabine liposome injection (DepoCyt®), dacarbazine (DTIC-Dome®), dactinomycin (Actinomycin D, Cosmegan), daunorubicin hydrochloride (Cerubidine®), daunorubicin citrate liposome injection (DaunoXome®), dexamethasone, docetaxel (Taxotere®), doxorubicin hydrochloride (Adriamycin®, Rubex®), etoposide (Vepesid®), fludarabine phosphate (Fludara®), 5-fluorouracil (Adrucil®, Efudex®), flutamide (Eulexin®), tezacitibine, Gemcitabine (difluorodeoxycitidine), hydroxyurea (Hydrea®), Idarubicin (Idamycin®), ifosfamide (IFEX®), irinotecan (Camptosar®), L-asparaginase (ELSPAR®), leucovorin calcium, melphalan (Alkeran®), 6-mercaptopurine (Purinethol®), methotrexate (Folex®), mitoxantrone (Novantrone®), mylotarg, paclitaxel (Taxol®), phoenix (Yttrium90/MX-DTPA), pentostatin, polifeprosan 20 with carmustine implant (Gliadel®), tamoxifen citrate (Nolvadex®), teniposide (Vumon®), 6-thioguanine, thiotepa, tirapazamine (Tirazone®), topotecan hydrochloride for injection (Hycamptin®), vinblastine (Velban®), vincristine (Oncovin®), and vinorelbine (Navelbine®).

[0496] Exemplary alkylating agents include, without limitation, nitrogen mustards, ethylenimine derivatives, alkyl sulfonates, nitrosoureas and triazenes): uracil mustard (Aminouracil Mustard®, Chlorethaminacil®, Demethyldopan®, Desmethyldopan®, Haemanthamine®, Nordopan®, Uracil nitrogen Mustard®, Uracillost®, Uracilmostaza®, Uramustin®, Uramustine®), chlormethine (Mustargen®), cyclophosphamide (Cytoxan®, Neosar®, Clafen®, Endoxan®, Procytox®, Revimmune™), ifosfamide (Mitoxana®), melphalan (Alkeran®), Chlorambucil (Leukeran®), pipobroman (Amedel®, Vercyte®), triethylenemelamine (Hemel®, Hexalen®, Hexastat®), triethylenethiophosphoramine, Temozolomide (Temodar®), thiotepa (Thioplex®), busulfan (Busilvex®, Myleran®), carmustine (BiCNU®), lomustine (CeeNU®), streptozocin (Zanosar®), and Dacarbazine (DTIC-Dome®). Additional exemplary alkylating agents include, without limitation, Oxaliplatin (Eloxatin®); Temozolomide (Temodar® and Temodal®); Dactinomycin (also known as actinomycin-D, Cosmegen®); Melphalan (also known as L-PAM, L-sarcolysin, and phenylalanine mustard, Alkeran®); Altretamine (also known as hexamethylmelamine (HMM), Hexalen®); Carmustine (BiCNU®); Bendamustine (Treanda®); Busulfan (Busulfex® and Myleran®); Carboplatin (Paraplatin®); Lomustine (also known as CCNU, CeeNU®); Cisplatin (also known as CDDP, Platinol® and Platinol®-AQ); Chlorambucil (Leukeran®); Cyclophosphamide (Cytoxan® and Neosar®); Dacarbazine (also known as DTIC, DIC and imidazole carboxamide, DTIC-Dome®); Altretamine (also known as hexamethylmelamine (HMM), Hexalen®); Ifosfamide (Ifex®); Prednumustine; Procarbazine (Matulane®); Mechlorethamine (also known as nitrogen mustard, mustine and mechloroethamine hydrochloride, Mustargen®); Streptozocin (Zanosar®); Thiotepa (also known as thiophosphoamide, TESPA and TSPA, Thioplex®); Cyclophosphamide (Endoxan®, Cytoxan®, Neosar®, Procytox®, Revimmune®); and Bendamustine HCl (Treanda®).

[0497] Exemplary mTOR inhibitors include, e.g., temsirolimus; ridaforolimus (formally known as deferolimus, (1R,2R,4S)-4-[(2R)-2 [(1R,9S,12S,15R,16E,18R,19R,21R,23S,24E,26E,28Z,30S,32S,35R)-1,18-dihydroxy-19,30-dimethoxy-15,17,21,23, 29,35-hexamethyl-2,3,10,14,20-pentaoxo-11,36-dioxa-4-azatricyclo[30.3.1.0^{4,9}] hexatriaconta-16,24,26,28-tetraen-12-yl]propyl]-2-methoxycyclohexyl dimethylphosphinate, also known as AP23573 and MK8669, and described in PCT Publication No. WO 03/064383); everolimus (Afinitor® or RAD001); rapamycin (AY22989, Sirolimus®); simapimod (CAS 164301-51-3); emsirolimus, (5-{2,4-Bis[(3S)-3-methylmorpholin-4-yl]pyrido[2,3-d]pyrimidin-7-yl}-2-methoxyphenyl)methanol (AZD8055); 2-Amino-8-[trans-4-(2-hydroxyethoxy)cyclohexyl]-6-(6-methoxy-3-pyridinyl)-4-methyl-pyrido[2,3-d]pyrimidin-7(8H)-one (PF04691502, CAS 1013101-36-4); and N²-[1,4-dioxo-4-[[4-(4-oxo-8-phenyl-4H-1-benzopyran-2-yl)morpholinium-4-yl]methoxy]butyl]-L-arginylglycyl-L-α-aspartylL-serine-inner salt (SEQ ID NO: 1482) (SF1126, CAS 936487-67-1), and XL765.

[0498] Exemplary immunomodulators include, e.g., afutuzumab (available from Roche®); pegfilgrastim (Neulasta®); lenalidomide (CC-5013, Revlimid®); thalidomide (Thalomid®), actimid (CC4047); and IRX-2 (mixture of human cytokines including interleukin 1, interleukin 2, and interferon γ, CAS 951209-71-5, available from IRX Therapeutics).

[0499] Exemplary anthracyclines include, e.g., doxorubicin (Adriamycin® and Rubex®); bleomycin (Lenoxane®); daunorubicin (dauorubicin hydrochloride, daunomycin, and rubidomycin hydrochloride, Cerubidine®); daunorubicin liposomal (daunorubicin citrate liposome, DaunoXome®); mitoxantrone (DHAD, Novantrone®); epirubicin (Ellence™); idarubicin (Idamycin®, Idamycin PFS®); mitomycin C (Mutamycin®); geldanamycin; herbimycin; ravidomycin; and desacetylravidomycin.

[0500] Exemplary vinca alkaloids include, e.g., vinorelbine tartrate (Navelbine®), Vincristine (Oncovin®), and Vindesine (Eldisine®)); vinblastine (also known as vinblastine sulfate, vincaleukoblastine and VLB, Alkaban-AQ® and Velban®); and vinorelbine (Navelbine®).

[0501] Exemplary proteosome inhibitors include bortezomib (Velcade®); carfilzomib (PX-171-007, (S)-4-Methyl-N—((S)-1-(((S)-4-methyl-1-((R)-2-methyloxiran-2-yl)-1-oxopentan-2-yl)amino)-1-oxo-3-phenylpropan-2-yl)-2-((S)-2-(2-morpholinoacetamido)-4-phenylbutanamido)-pentanamide); marizomib (NPI-0052); ixazomib citrate (MLN-9708); delanzomib (CEP-18770); and O-Methyl-N-[(2-methyl-5-thiazolyl)carbonyl]-L-seryl-O-methyl-N-[(1S)-2-[(2R)-2-methyl-2-oxiranyl]-2-oxo-1-(phenylmethyl)ethyl]-L-serinamide (ONX-0912).

### Biopolymer Delivery Methods

[0502] In some embodiments, one or more CAR-expressing cells as disclosed herein can be administered or delivered to the subject via a biopolymer scaffold, e.g., a biopolymer implant. Biopolymer scaffolds can support or enhance the delivery, expansion, and/or dispersion of the CAR-expressing cells described herein. A biopolymer scaffold comprises a biocompatible (e.g., does not substantially induce an inflammatory or immune response) and/or a biodegradable polymer that can be naturally occurring or synthetic.

[0503] Examples of suitable biopolymers include, but are not limited to, agar, agarose, alginate, alginate/calcium phosphate cement (CPC), beta-galactosidase (β-GAL), (1,2,3,4,6-pentaacetyl a-D-galactose), cellulose, chitin, chitosan, collagen, elastin, gelatin, hyaluronic acid collagen, hydroxyapatite, poly(3-hydroxybutyrate-co-3-hydroxy-hexanoate) (PHBHHx), poly(lactide), poly(caprolactone) (PCL), poly(lactide-co-glycolide) (PLG), polyethylene oxide (PEO), poly(lactic-co-glycolic acid) (PLGA), polypropylene oxide (PPO), polyvinyl alcohol) (PVA), silk, soy protein, and soy protein isolate, alone or in combination with any other polymer composition, in any concentration and in any ratio. The biopolymer can be augmented or modified with adhesion- or migration-promoting molecules, e.g., collagen-mimetic peptides that bind to the collagen receptor of lymphocytes, and/or stimulatory molecules to enhance the delivery, expansion, or function, e.g., anti-cancer activity, of the cells to be delivered. The biopolymer scaffold can be an injectable, e.g., a gel or a semi-solid, or a solid composition.

[0504] In some embodiments, CAR-expressing cells described herein are seeded onto the biopolymer scaffold prior to delivery to the subject. In embodiments, the biopolymer scaffold further comprises one or more additional therapeutic agents described herein (e.g., another CAR-expressing cell, an antibody, or a small molecule) or agents that enhance the activity of a CAR-expressing cell, e.g., incorporated or conjugated to the biopolymers of the scaffold. In embodiments, the biopolymer scaffold is injected, e.g., intratumorally, or surgically implanted at the tumor or within a proximity of the tumor sufficient to mediate an anti-tumor effect. Additional examples of biopolymer compositions and methods for their delivery are described in Stephan et al., Nature Biotechnology, 2015, 33:97-101; and WO2014/110591.

### Pharmaceutical Compositions and Treatments

[0505] Pharmaceutical compositions of the present invention may comprise a CAR-expressing cell, e.g., a plurality of CAR-expressing cells, as described herein, in combination with one or more pharmaceutically or physiologically acceptable carriers, diluents or excipients. Such compositions may comprise buffers such as neutral buffered saline, phosphate buffered saline and the like; carbohydrates such as glucose, mannose, sucrose or dextrans, mannitol; proteins; polypeptides or amino acids such as glycine; antioxidants; chelating agents such as EDTA or glutathione; adjuvants (e.g., aluminum hydroxide); and preservatives. Compositions of the present invention are in one aspect formulated for intravenous administration.

[0506] Pharmaceutical compositions of the present invention may be administered in a manner appropriate to the disease to be treated (or prevented). The quantity and frequency of administration will be determined by such factors as the condition of the patient, and the type and severity of the patient's disease, although appropriate dosages may be determined by clinical trials.

[0507] In one embodiment, the pharmaceutical composition is substantially free of, e.g., there are no detectable levels of a contaminant, e.g., selected from the group consisting of endotoxin, Mycoplasma, replication competent lentivirus (RCL), p24, VSV-G nucleic acid, HIV gag, residual anti-CD3/anti-CD28 coated beads, mouse antibodies, pooled human serum, bovine serum albumin, bovine serum, culture media components, vector packaging cell or plasmid components, a bacterium and a fungus. In one embodiment, the bacterium is at least one selected from the group consisting of Alcaligenes faecalis, Candida albicans, Escherichia coli, Haemophilus influenza, Neisseria meningitides, Pseudomonas aeruginosa, Staphylococcus aureus, Streptococcus pneumonia, and Streptococcus pyogenes group A.

[0508] When “an immunologically effective amount,” “an anti-tumor effective amount,” “a tumor-inhibiting effective amount,” or “therapeutic amount” is indicated, the precise amount of the compositions of the present invention to be administered can be determined by a physician with consideration of individual differences in age, weight, tumor size, extent of infection or metastasis, and condition of the patient (subject). It can generally be stated that a pharmaceutical composition comprising the T cells described herein may be administered at a dosage of 10⁴ to 10⁹ cells/kg body weight, in some instances 10⁵ to 10⁶ cells/kg body weight, including all integer values within those ranges. T cell compositions may also be administered multiple times at these dosages. The cells can be administered by using infusion techniques that are commonly known in immunotherapy (see, e.g., Rosenberg et al., New Eng. J. of Med. 319:1676, 1988).

[0509] In certain aspects, it may be desired to administer activated T cells to a subject and then subsequently redraw blood (or have an apheresis performed), activate T cells therefrom according to the present invention, and reinfuse the patient with these activated and expanded T cells. This process can be carried out multiple times every few weeks. In certain aspects, T cells can be activated from blood draws of from 10cc to 400cc. In certain aspects, T cells are activated from blood draws of 20cc, 30cc, 40cc, 50cc, 60cc, 70cc, 80cc, 90cc, or 100cc.

[0510] The administration of the subject compositions may be carried out in any convenient manner, including by aerosol inhalation, injection, ingestion, transfusion, implantation or transplantation. The compositions described herein may be administered to a patient trans arterially, subcutaneously, intradermally, intratumorally, intranodally, intramedullary, intramuscularly, by intravenous (i.v.) injection, or intraperitoneally. In one aspect, the T cell compositions of the present invention are administered to a patient by intradermal or subcutaneous injection. In one aspect, the CAR-expressing cell (e.g., T cell or NK cell) compositions of the present invention are administered by i.v. injection. The compositions of CAR-expressing cells (e.g., T cells or NK cells) may be injected directly into a tumor, lymph node, or site of infection.

[0511] In a particular exemplary aspect, subjects may undergo leukopheresis, wherein leukocytes are collected, enriched, or depleted ex vivo to select and/or isolate the cells of interest, e.g., immune effector cells (e.g., T cells or NK cells). These immune effector cell (e.g., T cell or NK cell) isolates may be expanded by methods known in the art and treated such that one or more CAR constructs of the invention may be introduced, thereby creating a CAR-expressing cell (e.g., CAR T cell or CAR-expressing NK cell) of the invention. Subjects in need thereof may subsequently undergo standard treatment with high dose chemotherapy followed by peripheral blood stem cell transplantation. In certain aspects, following or concurrent with the transplant, subjects receive an infusion of the expanded CAR-expressing cells (e.g., CAR T cells or NK cells) of the present invention. In an additional aspect, expanded cells are administered before or following surgery.

[0512] In embodiments, lymphodepletion is performed on a subject, e.g., prior to administering one or more cells that express a CAR described herein. In embodiments, the lymphodepletion comprises administering one or more of melphalan, cytoxan, cyclophosphamide, and fludarabine.

[0513] The dosage of the above treatments to be administered to a patient will vary with the precise nature of the condition being treated and the recipient of the treatment. The scaling of dosages for human administration can be performed according to art-accepted practices. The dose for CAMPATH, for example, will generally be in the range 1 to about 100 mg for an adult patient, usually administered daily for a period between 1 and 30 days. The preferred daily dose is 1 to 10 mg per day although in some instances larger doses of up to 40 mg per day may be used (described in U.S. Pat. No. 6,120,766).

[0514] In one embodiment, the CAR is introduced into immune effector cells (e.g., T cells or NK cells), e.g., using in vitro transcription, and the subject (e.g., human) receives an initial administration of CAR immune effector cells (e.g., T cells or NK cells) of the invention, and one or more subsequent administrations of the CAR immune effector cells (e.g., T cells or NK cells) of the invention, wherein the one or more subsequent administrations are administered less than 15 days, e.g., 14, 13, 12, 11, 10, 9, 8, 7, 6, 5, 4, 3, or 2 days after the previous administration. In one embodiment, more than one administration of the CAR immune effector cells (e.g., T cells or NK cells) of the invention are administered to the subject (e.g., human) per week, e.g., 2, 3, or 4 administrations of the CAR immune effector cells (e.g., T cells or NK cells) of the invention are administered per week. In one embodiment, the subject (e.g., human subject) receives more than one administration of the CAR immune effector cells (e.g., T cells or NK cells) per week (e.g., 2, 3 or 4 administrations per week) (also referred to herein as a cycle), followed by a week of no CAR immune effector cells (e.g., T cells or NK cells) administrations, and then one or more additional administration of the CAR immune effector cells (e.g., T cells or NK cells) (e.g., more than one administration of the CAR immune effector cells (e.g., T cells or NK cells) per week) is administered to the subject. In another embodiment, the subject (e.g., human subject) receives more than one cycle of CAR immune effector cells (e.g., T cells or NK cells), and the time between each cycle is less than 10, 9, 8, 7, 6, 5, 4, or 3 days. In one embodiment, the CAR immune effector cells (e.g., T cells or NK cells) are administered every other day for 3 administrations per week. In one embodiment, the CAR immune effector cells (e.g., T cells or NK cells) of the invention are administered for at least two, three, four, five, six, seven, eight or more weeks.

[0515] In one aspect, CAR-expressing cells (e.g., CARTs or CAR-expressing NK cells) are generated using lentiviral viral vectors, such as lentivirus. CAR-expressing cells (e.g., CARTs or CAR-expressing NK cells) generated that way will have stable CAR expression.

[0516] In one aspect, CAR-expressing cells, e.g., CARTs, are generated using a viral vector such as a gammaretroviral vector, e.g., a gammaretroviral vector described herein. CARTs generated using these vectors can have stable CAR expression.

[0517] In one aspect, CAR-expressing cells (e.g., CARTs or CAR-expressing NK cells) transiently express CAR vectors for 4, 5, 6, 7, 8, 9, 10, 11, 12, 13, 14, 15 days after transduction. Transient expression of CARs can be effected by RNA CAR vector delivery. In one aspect, the CAR RNA is transduced into the cell, e.g., T cell or NK cell, by electroporation.

[0518] A potential issue that can arise in patients being treated using transiently expressing CAR-expressing cells (e.g., CARTs or CAR-expressing NK cells) (particularly with murine scFv bearing CAR-expressing cells (e.g., CARTs or CAR-expressing NK cells)) is anaphylaxis after multiple treatments.

[0519] Without being bound by this theory, it is believed that such an anaphylactic response might be caused by a patient developing humoral anti-CAR response, i.e., anti-CAR antibodies having an anti-IgE isotype. It is thought that a patient's antibody producing cells undergo a class switch from IgG isotype (that does not cause anaphylaxis) to IgE isotype when there is a ten to fourteen day break in exposure to antigen.

[0520] If a patient is at high risk of generating an anti-CAR antibody response during the course of transient CAR therapy (such as those generated by RNA transductions), CAR-expressing cell (e.g., CART or CAR-expressing NK cell) infusion breaks should not last more than ten to fourteen days.

### EXAMPLES

[0521] The invention is further described in detail by reference to the following experimental examples. These examples are provided for purposes of illustration only, and are not intended to be limiting unless otherwise specified. Thus, the invention should in no way be construed as being limited to the following examples, but rather, should be construed to encompass any and all variations which become evident as a result of the teaching provided herein.

[0522] Without further description, it is believed that one of ordinary skill in the art can, using the preceding description and the following illustrative examples, make and utilize the compositions of the present invention and practice the claimed methods. The following working examples specifically point out various aspects of the present invention, and are not to be construed as limiting in any way the remainder of the disclosure.

### Example 1: Long Term Solid Tumor Control with CAR T Cells Co-Expressing IL-15R/IL-15

### Abstract

[0523] CAR19 T cells, chimeric antigen receptor T cells directed against CD19, have been demonstrated to induce long term disease remission in relapsed/refractory patients with B-cell malignancies and have recently received FDA approval for the treatment of pediatric and young adult patients with acute lymphoblastic leukemia (ALL). The ability of CAR T cells to expand and persist in the patient is correlated with response, thus increasing CAR T cell survival and persistence should enhance therapeutic efficacy. Such strategies are of particular relevance in CAR T cell therapy for the treatment of solid tumors, where CAR T cells need to maintain function in the hostile tumor microenvironment characterized by suppressive signals, nutrient deprivation, and low oxygen.

[0524] To this goal, we have generated CAR IL-15R/IL-15 constructs (FIG. 1). IL-15 signaling is known to generate survival signals to maintain naïve and memory CD8 T cells in the absence of antigen stimulation, and reduce apoptotic signaling.

[0525] During four rounds of re-stimulation over 4 weeks, CART cells co-expressing IL-15R/IL-15 proliferated similarly to IL-2 supplemented cultures. After the fourth re-stimulation, CAR T cells co-expressing IL-15R/IL-15 were maintained in culture without further cytokine supplements or antigen. These cultures persisted over an additional 10 weeks without expansion of CAR T cell numbers, and maintained antigen specific response, degranulation, IFN-γ release, and similar mitochondrial activity as week 4. Addition of IL-21 during 4 weeks of re-stimulation, improved long term survival for IL-15R/IL-15 CAR T cells. Additionally, persisting CAR T cells co-expressing IL-15R/IL-15 cultured without antigen stimulation for 4 weeks exhibited a greater naïve (CCR7+, CD45RO−) phenotype.

[0526] CAR T cells expressing IL-15R/IL-15 displayed enhanced long term anti-tumor efficacy in vivo. After 30 days post CAR T cell infusion, conventional CARmeso T cells were no longer able to control AsPC1 tumor, but CARmeso T cells co-expressing IL-15R/IL-15 maintained tumor control for over 70 days.

[0527] In summary, CAR T cells co-expressing IL-15R/IL-15 exhibited enhanced survival, performance and phenotypic profile, suggesting that this platform improvement holds promise for increasing the efficacy of CAR T cell therapy in tumors, e.g., solid tumors.

### Results:

[0528] Lentiviral constructs were designed to express chimeric antigen receptors (CAR) targeting huCD19 (CAR19) or hu mesothelin (CARmeso) with a CD8 leader (L), CD8 hinge (H), transmembrane domain (M), and intracellular domains (ICD) CD137 (4-1BB) and CD3 zeta (CD3-z) as shown in FIG. 1. IL-15Ra and IL-15 were co-expressed using the T2A system (T) which was co-expressed with the CAR using the P2A system (P) (FIG. 1). The CAR19 construct comprised a chimeric antigen receptor (CAR) targeting huCD19 with a CD8 leader (L), CD8 hinge (H), transmembrane domain (M), and intracellular domains (ICD) CD137 (4-1BB) and CD3 zeta (CD3-z).

[0529] The CAR19+IL-15R/−IL15 construct comprised the CAR19 construct and a P2A system, IL-15R, a T2A system and IL-15. The IL-15R/−IL15 construct comprised IL-15R, a T2A system and IL-15. The CARmeso+IL-15R/−IL15 construct comprised the CARmeso construct and a P2A system, IL-15R, a T2A system and IL-15. The CARmeso construct comprised a chimeric antigen receptor (CAR) targeting human mesothelin, with a CD8 leader (L), CD8 hinge (H), transmembrane domain (M), and intracellular domains (ICD) CD137 (4-1BB) and CD3 zeta (CD3-z). Lentiviral constructs were pseudotyped with VSV/G.

[0530] Co-expression of IL-15R/IL-15 with CAR expression was found to promote survival and persistence in long term cultures, with and without antigen stimulation. As shown in FIGS. 2A-2D, CAR19 and CARmeso T cells, were expanded through four rounds of re-stimulation with Nalm6 (N6) or K562-meso cells. Some groups were cultured with no antigen (No N6, No K-meso, or No Ag), while others were supplemented with 100 U/ml IL-2 and/or 10 ug/ml IL-21. After 4 weeks of re-stimulation, T cells were cultured alone re-placing half media volume every 3-4 days without any cytokine supplements for up to an additional 13 weeks (FIGS. 2C and 2D).

[0531] After surviving more than 60 days in culture after initial expansion without antigen, CAR T cells co-expressing IL-15R/IL-15 showed a naïve (CCR7+, CD45RO−) phenotype. It was observed that CAR19 T cells co-expressing IL-15R/IL-15 show enhanced CCR7 expression in non stimulated cells and in activated cells with addition of IL-21 (FIG. 3). CAR19 T cells cultures at the end of weeks 1, 3 and 4 were stained for CCR7 and CD45 expression and the T cell subsets were defined as follows: naïve (CCR7+/CD45RO−), Central memory (CCR7+/CD45RO+), Effector memory (CCR7−/CD45RO+) and terminal effectors (CCR7−/CD45RO−). T cell cultures at the end of week 4 primarily consisted of CD8+ T cells, e.g., >90% of CD8+ T cells. CAR T cells expressing IL-15R/IL-15 from initial expansions co-cultured with four rounds of re-stimulation with antigen-expressing tumor cells, displayed a less differentiated phenotype (CCR7+/−, CD45RO+) than CAR T cells alone, and reverted to a more naïve (CCR7+, CD45RO−) population as targeted antigen was eliminated.

[0532] CAR19 T cells co-expressing IL-15R/IL-15 were shown to maintain functional response to antigen after persisting 10 weeks in antigen free cultures. Effector functions of CAR19 T cells were assessed. T cell populations at week 4 and week 13 were co-cultured with or without either K562 cells expressing CD19 (K562-CD19) or mesothelin (K562-Meso), or PMA and ionomycin and incubated for 6 hours with CD107a, monesin and Brefeldin A. The resulting T cell populations were fluorescently stained for live/dead, surface expression of CD3, CD4, and CD8, followed by intracellular staining to detect IFN-γ. Upon activation in co-cultures with antigen-expressing tumor cells, CAR T cells expressing IL-15R/IL-15 secreted cytokines, maintained cytolytic function and proliferative capacity (FIG. 4).

[0533] CAR T cells expressing IL-15R/IL-15 displayed enhanced long-term anti-tumor efficacy in vivo. CARmeso+IL-15R/IL-15 T cells exhibited superior long-term tumor control compared to CARmeso T cells alone in the AsPC1 pancreatic cancer xenograft NSG mouse model. CARmeso T cells co-expressing IL-15R/IL-15, and CARmeso T cells were evaluated in the AsPC1 NSG mouse model. One million AsPC1 cells were injected subcutaneously into the right flanks of NSG mice to establish tumors. Tumor growth was monitored by caliper measurements. On day 38 (tumors averaged 250 mm³) either 1×10⁵ or 3×10⁵ CAR+ T cells were injected intratumorally (IT) and tumors were monitored twice weekly. Initially, both CARmeso and CARmeso T cells co-expressing IL15R/15 T cells exhibited similar anti-tumor efficacy in the AsPC1 pancreatic cancer xenograft models. However, after 30 days post CAR T cell infusion only CARmeso T cells co-expressing IL-15R/IL-15 T cells displayed long term tumor control, while CARmeso T cells were no longer able to control AsPC1 tumor (FIGS. 5A-5D). This difference was more pronounced at the higher T cell dose. CARmeso T cells co-expressing IL-15R/IL-15 maintained tumor control for over 70 days.

### CONCLUSION

[0534] Continuous expression of IL-15R/IL-15 was shown to endow CAR T cells with, e.g., enhanced survival and persistence in long term cultures, both with and without antigen stimulation. CAR T cells co-expressing IL-15R/IL-15 also proliferated similarly to IL-2 supplemented cultures. Additionally, CAR T cells co-expressing IL-15R/IL-15 persisted over 10 weeks without antigen, exhibited a more naïve and memory phenotype (CCR7+), and maintained antigen specific degranulation and IFN-g production. Addition of IL-21 during 4 weeks of re-stimulation resulted in improved long-term survival of CAR+IL-15R/IL-15 T cells cultured without antigen. Finally, the data showed that CAR T cells co-expressing IL-15R/IL-15 exhibited enhanced anti-tumor efficacy in the AsPC1 pancreatic cancer xenograft models. In summary, CAR T cells co-expressing IL-15R/IL-15 exhibited enhanced survival, performance and phenotypic profiles, suggesting that, e.g., this platform improvement holds promise for increasing the efficacy of CAR T cell therapy in tumors, e.g., solid tumors.

### EQUIVALENTS

[0535] The disclosures of each and every patent, patent application, and publication cited herein are hereby incorporated herein by reference in their entirety. While this invention has been disclosed with reference to specific aspects, it is apparent that other aspects and variations of this invention may be devised by others skilled in the art without departing from the true spirit and scope of the invention. The appended claims are intended to be construed to include all such aspects and equivalent variations.

What is claimed is:

1. A nucleic acid molecule, e.g., an isolated nucleic acid molecule, comprising
(i) a first nucleic acid sequence encoding a chimeric antigen receptor (CAR) molecule that binds to an antigen (e.g., CD19, Mesothelin or BCMA);
(ii) a second nucleic acid sequence comprising an IL-15 receptor (IL-15R) molecule; and
(iii) a third nucleic acid sequence comprising an IL-15 molecule,
wherein the first nucleic acid sequence, second nucleic acid sequence and third nucleic acid sequence are disposed on a single nucleic acid molecule, e.g., a viral vector, e.g., a lentivirus vector.

2. The nucleic acid molecule of claim 1, comprising a multicistronic lentivirus vector.

3. The nucleic acid molecule of claim 1 or 2, wherein the single nucleic acid molecule has the following arrangement in an N- to C-terminal orientation:
(i) the first nucleic acid sequence-a first linker-the second nucleic acid sequence-a second linker-the third nucleic acid sequence; or
(ii) the first nucleic acid sequence-a first linker-the third nucleic acid sequence-a second linker-the second nucleic acid sequence,
wherein the first and second linkers are different.

4. The nucleic acid molecule of claim 1 or 2, wherein the single nucleic acid molecule has the following arrangement in an N- to C-terminal orientation:
(iii) the second nucleic acid sequence-a first linker-the third nucleic acid sequence-a second linker-the first nucleic acid sequence; or
(iv) the third nucleic acid sequence-a first linker-the second nucleic acid sequence-a second linker-the first nucleic acid sequence,
wherein the first and second linkers are different.

5. The nucleic acid molecule of claim 3 or 4, wherein the linker encodes a self-cleavage site, e.g., a P2A site, a T2A site, an E2A site, or an F2A site.

6. The nucleic acid molecule of any of claims 3-5, wherein the first linker encodes a P2A site and the second linker encodes a T2A site, wherein:
(i) the first linker comprises the nucleotide sequence of SEQ ID NO: 23 (or a sequence at least about 85%, 90%, 95%, 99% or more identical thereto, and/or having one, two, three or more substitutions, insertions, deletions, or modifications), and/or
(ii) the second linker comprises a nucleotide sequence encoding SEQ ID NO: 1478 (or a sequence at least about 85%, 90%, 95%, 99% or more identical thereto, and/or having one, two, three or more substitutions, insertions, deletions, or modifications).

7. The nucleic acid molecule of any of the preceding claims, wherein the CAR molecule comprises, in an N- to C-terminal orientation, an antigen binding domain that binds to the antigen, a transmembrane domain, and an intracellular signaling domain, optionally wherein the antigen binding domain is connected to the transmembrane domain by a hinge domain.

8. The nucleic acid molecule of claim 7, further comprising a leader sequence.

9. The nucleic acid molecule of any of the preceding claims, wherein the third nucleic acid sequence encodes an amino acid comprising the sequence of SEQ ID NO: 1002, a sequence at least about 85%, 90%, 95%, 99% or more identical to SEQ ID NO:1002, or a sequence having one, two, three or more substitutions, insertions, deletions, or modifications compared to SEQ ID NO: 1002.

10. The nucleic acid molecule of any of the preceding claims, wherein the second nucleic acid sequence encodes an amino acid comprising the sequence of SEQ ID NO: 1001, a sequence at least about 85%, 90%, 95%, 99% or more identical to SEQ ID NO:1001, or a sequence having one, two, three or more substitutions, insertions, deletions, or modifications compared to SEQ ID NO: 1001.

11. The nucleic acid molecule of any of the preceding claims, wherein the antigen is selected from: CD19; CD123; CD22; CD30; CD171; CS-1; C-type lectin-like molecule-1, CD33; epidermal growth factor receptor variant III (EGFRvIII); ganglioside G2 (GD2); ganglioside GD3; TNF receptor family member; B-cell maturation antigen; Tn antigen ((Tn Ag) or (GalNAcα-Ser/Thr)); prostate-specific membrane antigen (PSMA); Receptor tyrosine kinase-like orphan receptor 1 (ROR1); Fms-Like Tyrosine Kinase 3 (FLT3); Tumor-associated glycoprotein 72 (TAG72); CD38; CD44v6; Carcinoembryonic antigen (CEA); Epithelial cell adhesion molecule (EPCAM); B7H3 (CD276); KIT (CD117); Interleukin-13 receptor subunit alpha-2; Mesothelin; Interleukin 11 receptor alpha (IL-11Ra); prostate stem cell antigen (PSCA); Protease Serine 21; vascular endothelial growth factor receptor 2 (VEGFR2); Lewis (Y) antigen; CD24; Platelet-derived growth factor receptor beta (PDGFR-beta); Stage-specific embryonic antigen-4 (SSEA-4); CD20; Folate receptor alpha; Receptor tyrosine-protein kinase ERBB2 (Her2/neu); Mucin 1, cell surface associated (MUC1); epidermal growth factor receptor (EGFR); neural cell adhesion molecule (NCAM); Prostase; prostatic acid phosphatase (PAP); elongation factor 2 mutated (ELF2M); Ephrin B2; fibroblast activation protein alpha (FAP); insulin-like growth factor 1 receptor (IGF-I receptor), carbonic anhydrase IX (CAIX); Proteasome (Prosome, Macropain) Subunit, Beta Type, 9 (LMP2); glycoprotein 100 (gp100); oncogene polypeptide consisting of breakpoint cluster region (BCR) and Abelson murine leukemia viral oncogene homolog 1 (Abl) (bcr-abl); tyrosinase; ephrin type-A receptor 2 (EphA2); Fucosyl GM1; sialyl Lewis adhesion molecule (sLe); ganglioside GM3; transglutaminase 5 (TGS5); high molecular weight-melanoma-associated antigen (HMWMAA); o-acetyl-GD2 ganglioside (OAcGD2); Folate receptor beta; tumor endothelial marker 1 (TEM1/CD248); tumor endothelial marker 7-related (TEM7R); claudin 6 (CLDN6); thyroid stimulating hormone receptor (TSHR); G protein-coupled receptor class C group 5, member D (GPRC5D); chromosome X open reading frame 61 (CXORF61); CD97; CD179a; anaplastic lymphoma kinase (ALK); Polysialic acid; placenta-specific 1 (PLAC1); hexasaccharide portion of globoH glycoceramide (GloboH); mammary gland differentiation antigen (NY-BR-1); uroplakin 2 (UPK2); Hepatitis A virus cellular receptor 1 (HAVCR1); adrenoceptor beta 3 (ADRB3); pannexin 3 (PANX3); G protein-coupled receptor 20 (GPR20); lymphocyte antigen 6 complex, locus K 9 (LY6K); Olfactory receptor 51E2 (OR51E2); TCR Gamma Alternate Reading Frame Protein (TARP); Wilms tumor protein (WT1); Cancer/testis antigen 1 (NY-ESO-1); Cancer/testis antigen 2 (LAGE-1a); Melanoma-associated antigen 1 (MAGE-A1); ETS translocation-variant gene 6, located on chromosome 12p (ETV6-AML); sperm protein 17 (SPA17); X Antigen Family, Member 1A (XAGE1); angiopoietin-binding cell surface receptor 2 (Tie 2); melanoma cancer testis antigen-1 (MAD-CT-1); melanoma cancer testis antigen-2 (MAD-CT-2); Fos-related antigen 1; tumor protein p53 (p53); p53 mutant; prostein; surviving; telomerase; prostate carcinoma tumor antigen-1, melanoma antigen recognized by T cells 1; Rat sarcoma (Ras) mutant; human Telomerase reverse transcriptase (hTERT); sarcoma translocation breakpoints; melanoma inhibitor of apoptosis (ML-IAP); ERG (transmembrane protease, serine 2 (TMPRSS2) ETS fusion gene); N-Acetyl glucosaminyl-transferase V (NA17); paired box protein Pax-3 (PAX3); Androgen receptor; Cyclin B1; v-myc avian myelocytomatosis viral oncogene neuroblastoma derived homolog (MYCN); Ras Homolog Family Member C (RhoC); Tyrosinase-related protein 2 (TRP-2); Cytochrome P450 1B1 (CYP1B1); CCCTC-Binding Factor (Zinc Finger Protein)-Like, Squamous Cell Carcinoma Antigen Recognized By T Cells 3 (SART3); Paired box protein Pax-5 (PAX5); proacrosin binding protein sp32 (OY-TES1); lymphocyte-specific protein tyrosine kinase (LCK); A kinase anchor protein 4 (AKAP-4); synovial sarcoma, X breakpoint 2 (SSX2); Receptor for Advanced Glycation Endproducts (RAGE-1); renal ubiquitous 1 (RU1); renal ubiquitous 2 (RU2); legumain; human papilloma virus E6 (HPV E6); human papilloma virus E7 (HPV E7); intestinal carboxyl esterase; heat shock protein 70-2 mutated (mut hsp70-2); CD79a; CD79b; CD72; Leukocyte-associated immunoglobulin-like receptor 1 (LAIR1); Fc fragment of IgA receptor (FCAR or CD89); Leukocyte immunoglobulin-like receptor subfamily A member 2 (LILRA2); CD300 molecule-like family member f (CD300LF); C-type lectin domain family 12 member A (CLEC12A); bone marrow stromal cell antigen 2 (BST2); EGF-like module-containing mucin-like hormone receptor-like 2 (EMR2); lymphocyte antigen 75 (LY75); Glypican-3 (GPC3); Fc receptor-like 5 (FCRL5); or immunoglobulin lambda-like polypeptide 1 (IGLL1).

12. The nucleic acid molecule of any of the preceding claims, wherein the antigen is chosen from CD19, CD22, BCMA, CD20, CD123, EGFRvIII, or mesothelin.

13. The nucleic acid molecule of any of the preceding claims, wherein the antigen is a solid tumor antigen.

14. The nucleic acid molecule of any of the preceding claims, wherein the antigen is selected from mesothelin, EGFRvIII, GD2, Tn antigen, sTn antigen, Tn-O-Glycopeptides, sTn-O-Glycopeptides, PSMA, CD97, TAG72, CD44v6, CEA, EPCAM, KIT, IL-13Ra2, leguman, GD3, CD171, IL-11Ra, PSCA, MAD-CT-1, MAD-CT-2, VEGFR2, LewisY, CD24, PDGFR-beta, SSEA-4, folate receptor alpha, ERBBs (e.g., ERBB2), Her2/neu, MUC1, EGFR, NCAM, Ephrin B2, CAIX, LMP2, sLe, HMWMAA, o-acetyl-GD2, folate receptor beta, TEM1/CD248, TEM7R, FAP, Legumain, HPV E6 or E7, ML-IAP, CLDN6, TSHR, GPRC5D, ALK, polysialic acid, Fos-related antigen, neutrophil elastase, TRP-2, CYP1B1, sperm protein 17, beta human chorionic gonadotropin, AFP, thyroglobulin, PLAC1, globoH, RAGE1, MN-CA IX, human telomerase reverse transcriptase, intestinal carboxyl esterase, mut hsp 70-2, NA-17, NY-BR-1, UPK2, HAVCR1, ADRB3, PANX3, NY-ESO-1, GPR20, Ly6k, OR51E2, TARP, or GFRα4.

15. The nucleic acid molecule of any of the preceding claims, wherein the transmembrane domain comprises a transmembrane domain of a protein chosen from the alpha, beta or zeta chain of the T-cell receptor, CD28, CD3 epsilon, CD45, CD4, CD5, CD8, CD9, CD16, CD22, CD33, CD37, CD64, CD80, CD86, CD123, CD134, CD137 or CD154,
optionally wherein the transmembrane domain comprises:
(i) a transmembrane domain of CD8; or
(ii) the amino acid sequence of SEQ ID NO: 1026 (or a sequence at least about 85%, 90%, 95%, 99% or more identical thereto, and/or having one, two, three or more substitutions, insertions or deletions, e.g., conserved substitutions).

16. The nucleic acid molecule of any of the preceding claims, wherein the intracellular signaling domain comprises a primary signaling domain, optionally wherein the primary signaling domain comprises:
(i) a functional signaling domain derived from CD3 zeta, TCR zeta, FcR gamma, FcR beta, CD3 gamma, CD3 delta, CD3 epsilon, CD5, CD22, CD79a, CD79b, CD278 (ICOS), FcεRI, DAP10, DAP12, or CD66d; or
(ii) the amino acid sequence of SEQ ID NO: 1034 or 1037 (or a sequence at least about 85%, 90%, 95%, 99% or more identical thereto, and/or having one, two, three or more substitutions, insertions or deletions, e.g., conserved substitutions).

17. The nucleic acid molecule of any of the preceding claims, wherein the intracellular signaling domain comprises a costimulatory domain, optionally wherein:
(i) the costimulatory domain comprises a functional signaling domain derived from MHC class I molecule, TNF receptor protein, Immunoglobulin-like protein, cytokine receptor, integrin, signalling lymphocytic activation molecule (SLAM), activating NK cell receptor, BTLA, a Toll ligand receptor, OX40, CD2, CD7, CD27, CD28, CD30, CD40, CD5, ICAM-1, 4-1BB (CD137), B7-H3, ICOS (CD278), GITR, BAFFR, LIGHT, HVEM (LIGHTR), KIRDS2, SLAMF7, NKp80 (KLRF1), NKp44, NKp30, NKp46, CD19, CD4, CD8alpha, CD8beta, IL2R beta, IL2R gamma, IL7R alpha, ITGA4, VLA1, CD49a, ITGA4, IA4, CD49D, ITGA6, VLA-6, CD49f, ITGAD, CD11d, ITGAE, CD103, ITGAL, CD11a, LFA-1, ITGAM, CD11b, ITGAX, CD11c, ITGB1, CD29, ITGB2, CD18, ITGB7, NKG2D, NKG2C, TNFR2, TRANCE/RANKL, DNAM1 (CD226), SLAMF4 (CD244, 2B4), CD84, CD96 (Tactile), CEACAM1, CRTAM, Ly9 (CD229), CD160 (BY55), PSGL1, CD100 (SEMA4D), CD69, SLAMF6 (NTB-A, Ly108), SLAM (SLAMF1, CD150, IPO-3), BLAME (SLAMF8), SELPLG (CD162), LTBR, LAT, GADS, SLP-76, PAG/Cbp, CD19a, CD28-OX40, CD28-4-1BB, or a ligand that specifically binds with CD83;
(ii) the costimulatory domain comprises a functional signaling domain derived from 4-1BB; or
(iii) the costimulatory domain comprises the amino acid sequence of SEQ ID NO: 1029 (or a sequence at least about 85%, 90%, 95%, 99% or more identical thereto, and/or having one, two, three or more substitutions, insertions or deletions, e.g., conserved substitutions).

18. A CAR IL-15/IL15R polypeptide comprising:
(i) a chimeric antigen receptor (CAR) molecule that binds to an antigen (e.g., an antigen described herein, e.g., CD19 or Mesothelin);
(ii) an IL-15 receptor (IL-15R) molecule; and
(iii) an IL-15 molecule,
wherein (i)-(iii) are expressed in the same frame on a single polypeptide chain.

19. The polypeptide of claim 18, wherein the polypeptide has the following arrangement in an N- to C-terminal orientation:
CAR molecule-a first linker-IL-15R molecule-a second linker-IL-15 molecule
wherein the first and second linkers are different.

20. The polypeptide of claim 18, wherein the polypeptide has the following arrangement in an N- to C-terminal orientation:
CAR molecule-a first linker-IL-15 molecule-a second linker-IL-15R molecule,
wherein the first and second linkers are different.

21. The polypeptide of claim 18, wherein the polypeptide has the following arrangement in an N- to C-terminal orientation:
IL-15R molecule-a first linker-IL-15 molecule-a second linker-CAR molecule; or
IL-15 molecule-a first linker-IL-15R molecule-a second linker-CAR molecule,
wherein the first and second linkers are different.

22. The polypeptide of any of claims 18-21, wherein the wherein the first linker comprises a P2A site and the second linker comprises a T2A site, wherein:
(i) the first linker comprises the amino acid sequence of SEQ ID NO: 1479 (or a sequence at least about 85%, 90%, 95%, 99% or more identical thereto, and/or having one, two, three or more substitutions, insertions, deletions, or modifications), and/or
(ii) the second linker comprises the amino acid sequence of SEQ ID NO: 1478 (or a sequence at least about 85%, 90%, 95%, 99% or more identical thereto, and/or having one, two, three or more substitutions, insertions, deletions, or modifications).

23. The polypeptide of any of claims 18-22, wherein the CAR molecule comprises, in an N- to C-terminal orientation, an antigen binding domain that binds to the antigen, a transmembrane domain, and an intracellular signaling domain, optionally wherein the antigen binding domain is connected to the transmembrane domain by a hinge domain.

24. The polypeptide of any of claims 18-23, comprising the amino acid sequence of SEQ ID NO: 1002, a sequence at least about 85%, 90%, 95%, 99% or more identical to SEQ ID NO: 1002, or a sequence having one, two, three or more substitutions, insertions, deletions, or modifications compared to SEQ ID NO: 1002.

25. The polypeptide of any of claims 18-24, comprising the amino acid sequence of SEQ ID NO: 1001, a sequence at least about 85%, 90%, 95%, 99% or more identical to SEQ ID NO:1001, or a sequence having one, two, three or more substitutions, insertions, deletions, or modifications compared to SEQ ID NO: 1001.

26. A cell, e.g., an immune effector cell, comprising the nucleic acid molecule of any of claims 1-17 or the polypeptide of any of claims 18-25.

27. A vector, e.g., lentiviral vector, comprising the nucleic acid molecule of any of claims 1-17, or a nucleic acid encoding the polypeptide of any of claims 18-25.

28. A method of making a population of immune effector cells expressing Chimeric Antigen Receptor (CAR) molecule, IL-15R molecule and IL-15 molecule (“CAR IL-15/IL-15R expressing cells”), comprising:
a) providing a population of immune effector cells, e.g., T cells or NK cells;
b) contacting the population of immune effector cells with a nucleic acid molecule of any of claims 1-15, or a vector of claim 27; and
c) maintaining the cells under conditions that allow expression of the CAR polypeptide, thereby making a population of CAR IL-15/IL-15R expressing immune effector cells.

29. The method of claim 28, wherein the nucleic acid is DNA or RNA.

30. The method of any of claim 28 or 29, wherein (b) comprises performing lentiviral transduction to deliver the nucleic acid to the immune effector cells.

31. The method of claim any of claims 28-30, further comprising contacting the population of cells with a ligand, e.g., with an extracellular ligand, that binds to the CAR molecule, thereby stimulating the population of cells.

32. The method of claim 31, wherein the ligand comprises a cognate antigen molecule or an antibody molecule that binds to the CAR molecule.

33. The method of claim 32, wherein the ligand, e.g., cognate antigen molecule, is immobilized, e.g., on a substrate, e.g., a bead or a cell, or is soluble.

34. The method of any of claims 31-33, wherein the population of cells is contacted, e.g., stimulated, with the cognate antigen molecule at least 1 time, 2 times, 3 times, 4 times, 5 times, 6 times, 7 times or 8 times, e.g., 4 times, wherein each contact period, e.g., stimulation, lasts for about 1 week.

35. The method of any of claims 31-34, further comprising contacting the population of cells with an IL-21 molecule.

36. The method of claim 35, wherein the IL-21 molecule is provided at an amount of at least 5, 10, 15, 20, 30, 40, 50 or 100 ug/ml, e.g., 10 ug/ml.

37. The method of claim 35 or 36, wherein the IL-21 molecule promotes a naïve T cell phenotype, e.g., CD45RO− CCR7+.

38. The method of any of claims 31-34, wherein following contacting, e.g., stimulating, with the cognate antigen molecule, the population of cells is not contacted with an exogenous cytokine or cognate antigen molecule.

39. The method of any of claims 31-38, wherein the population of cells is maintained for at least 1, 2, 3, 4, 5, 6, 7, 8, 9, 10, 11, 12, 13, 14, 15 or 20 weeks, e.g., 10 weeks.

40. The method of any of claims 31-39, wherein the population of cells has one, two, three, four or all of the following characteristics:
(i) no or minimal loss in viability as measured by an assay of Example 1;
(ii) ability to have an antigen specific response, as measured by an assay of Example 1;
(iii) ability to induce degranulation, e.g., as measured by CD107a expression, as measured by an assay of Example 1;
(iv) ability to induce IFN-g release, e.g., as measured by IFN-g expression in an assay of Example 1; or
(v) mitochondrial activity as measured by an assay of Example 1,
compared to an otherwise similar CAR IL-15/IL-15R expressing population prior to culturing without cytokine or antigen, e.g., at four weeks after contacting, e.g., stimulation, with a cognate antigen molecule.

41. The method of claim 28 or 31, which results in an increase in the population of cells expressing CD45RO−CCR7+, e.g., by about at least 10%, 20%, 30%, 40%, 50%, 60%, 70%, 80%, 90%, 95%, 100% or greater, compared to a population of immune effector cells contacted with a nucleic acid molecule encoding a CAR molecule without IL-15R and/or IL-15.

42. The method of any of claims 28-39, comprising:
(i) expanding the population of cells, e.g., for at least 1, 2, 3, 4, 5, 6, 7, 8, 9, 10, 11, 12, 13, 14, 15, 16, 17, 18, 19, 20, 21, 22, 23, 24, 25, 26, 27, or 28 days or for 1-7, 7-14, 14-21, or 14-28 days; or
(ii) expanding the population of cells, e.g., by at least, 5, 10, 20, 30, 40, 50, 60, 70, 80, 90, or 100-fold change in cell number or more, e.g., up to about 40 or 50-fold, e.g., under growth conditions of Example 1.

43. The method of any of claims 28-42, wherein the population of CAR IL-15/IL-15R expressing cell exhibits enhanced anti-tumor efficacy compared to a population of cells expressing a CAR molecule, as measured by an assay of Example 1.

44. A method of evaluating a population of CAR IL-15/IL-15R expressing cells, comprising measuring the level, e.g., activity or expression level, of CD45RO and CCR7 in the population of cells, wherein:
a low level of CD45RO expression (e.g., CD45RO−) and a high level of CCR7 expression (e.g., CCR7+) is indicative that the sample is suitable for treatment; and
a high level of CD45RO expression (e.g., CD45RO+) and a low level of CCR7 expression (e.g., CCR7−) is indicative that the sample is not suitable for treatment
thereby evaluating the CAR-IL-15 complex expressing cell.

45. A cell, e.g., an immune effector cell, e.g., a T cell or NK cell, comprising:
(i) a first nucleic acid sequence encoding a chimeric antigen receptor (CAR) molecule that binds to an antigen (e.g., an antigen described herein);
(ii) a second nucleic acid sequence encoding an IL-15 receptor (IL-15R) molecule; and
(iii) a third nucleic acid sequence encoding an IL-15 molecule,
wherein the first nucleic acid sequence, the second nucleic acid sequence, and the third nucleic acid sequence are disposed on a single nucleic acid molecule.

46. The cell of claim 45, wherein the single nucleic acid molecule has the following arrangement in an N- to C-terminal orientation:
(i) the first nucleic acid sequence-a first linker-the second nucleic acid sequence-a second linker-the third nucleic acid sequence; or
(ii) the first nucleic acid sequence-a first linker-the third nucleic acid sequence-a second linker-the second nucleic acid sequence,
wherein the first and second linkers are different.

47. The cell of claim 45 or 46, wherein the single nucleic acid molecule has the following arrangement in an N- to C-terminal orientation:
(iii) the second nucleic acid sequence-a first linker-the third nucleic acid sequence-a second linker-the first nucleic acid sequence; or
(iv) the third nucleic acid sequence-a first linker-the second nucleic acid sequence-a second linker-the first nucleic acid sequence,
wherein the first and second linkers are different.

48. The cell of claim 46 or 47, wherein the linker encodes a self-cleavage site, e.g., a P2A site, a T2A site, an E2A site, or an F2A site.

49. The cell of any one of claims 45-48, wherein the CAR molecule comprises, in an N- to C-terminal orientation, an antigen binding domain that binds to the antigen, a transmembrane domain, and an intracellular signaling domain, optionally wherein the antigen binding domain is connected to the transmembrane domain by a hinge domain.

50. A method of treating a subject having a disease associated with expression of an antigen, e.g., a tumor antigen described herein, e.g., CD19, Mesothelin or BCMA, comprising administering to the subject an effective number of a population of cells of any one of claims 45-49, or a population of cells comprising the nucleic acid molecule of any of claims 1-17, or a population of cells comprising the polypeptide of any of claims 18-25.

51. A method of providing an anti-cancer immune response in a subject having a disease associated with expression of an antigen, e.g., a tumor antigen described herein, e.g., CD19, Mesothelin or BCMA, comprising administering to the subject an effective number of a population of cells of any one of claims 45-51, or a population of cells comprising the nucleic acid molecule of any of claims 1-17, or a population of cells comprising the polypeptide of any of claims 18-25, thereby providing the anti-cancer immune response.

52. The method of claim 50 or 51, wherein the disease associated with expression of an antigen, e.g., a tumor antigen described herein, e.g., CD19, Mesothelin or BCMA, is a cancer.

53. The method of claim 52, wherein the cancer is a solid tumor.

54. The method of claim 52 or 53, wherein the cancer is chosen from mesothelioma (e.g., malignant pleural mesothelioma); lung cancer (e.g., non-small cell lung cancer, small cell lung cancer, squamous cell lung cancer, or large cell lung cancer); pancreatic cancer (e.g., pancreatic ductal adenocarcinoma, or metastatic pancreatic ductal adenocarcinoma (PDA)); esophageal cancer (e.g., esophageal adenocarcinoma), ovarian cancer (e.g., serous epithelial ovarian cancer), breast cancer, colorectal cancer, bladder cancer, glioblastoma, prostate cancer, cervical cancer, skin cancer, melanoma, renal cancer, liver cancer, brain cancer, thymoma, sarcoma, carcinoma, uterine cancer, kidney cancer, gastrointestinal cancer, urothelial cancer, pharynx cancer, head and neck cancer, rectal cancer, or any combination thereof.

55. The method of claim 52, wherein the cancer is a hematological cancer, e.g., a hematological cancer chosen from a leukemia or lymphoma, e.g., the cancer is chosen from chronic lymphocytic leukemia (CLL), mantle cell lymphoma (MCL), multiple myeloma, acute lymphoid leukemia (ALL), Hodgkin lymphoma, B-cell acute lymphoid leukemia (BALL), T-cell acute lymphoid leukemia (TALL), small lymphocytic leukemia (SLL), B cell prolymphocytic leukemia, blastic plasmacytoid dendritic cell neoplasm, Burkitt's lymphoma, diffuse large B cell lymphoma (DLBCL), DLBCL associated with chronic inflammation, chronic myeloid leukemia, myeloproliferative neoplasms, follicular lymphoma, pediatric follicular lymphoma, hairy cell leukemia, small cell- or a large cell-follicular lymphoma, malignant lymphoproliferative conditions, MALT lymphoma (extranodal marginal zone lymphoma of mucosa-associated lymphoid tissue), Marginal zone lymphoma, myelodysplasia, myelodysplastic syndrome, non-Hodgkin lymphoma, plasmablastic lymphoma, plasmacytoid dendritic cell neoplasm, Waldenstrom macroglobulinemia, splenic marginal zone lymphoma, splenic lymphoma/leukemia, splenic diffuse red pulp small B-cell lymphoma, hairy cell leukemia-variant, lymphoplasmacytic lymphoma, a heavy chain disease, plasma cell myeloma, solitary plasmocytoma of bone, extraosseous plasmocytoma, nodal marginal zone lymphoma, pediatric nodal marginal zone lymphoma, primary cutaneous follicle center lymphoma, lymphomatoid granulomatosis, primary mediastinal (thymic) large B-cell lymphoma, intravascular large B-cell lymphoma, ALK+ large B-cell lymphoma, large B-cell lymphoma arising in HHV8-associated multicentric Castleman disease, primary effusion lymphoma, B-cell lymphoma, acute myeloid leukemia (AML), or unclassifiable lymphoma.

56. The method of any of claims 50-55, wherein the cell is administered systemically or locally.

57. The method of claim 56, wherein the subject has a tumor, e.g., a solid tumor, and the cell, is administered through intratumoral administration.

58. The method of any one of claims 50-57, further comprising administering a third therapeutic agent, e.g., as described herein.

59. The method of claim 58, wherein the third therapeutic agent is a checkpoint modulator, optionally wherein the third therapeutic agent is an anti-PD-1 antibody molecule, an anti-PD-L1 antibody molecule, an anti-CTLA-4 antibody molecule, an anti-TIM-3 antibody molecule, or an anti-LAG-3 molecule.

60. A method of evaluating or predicting a subject's responsiveness to a CAR-expressing cell therapy, comprising acquiring a value for the level, e.g., activity or expression level, of CD45RO and CCR7 in the population of cells, wherein:
a low level of CD45RO expression (e.g., CD45RO−) and a high level of CCR7 expression (e.g., CCR7+) is indicative or predictive of increased responsiveness of the subject to the CAR IL-15/IL-15R-expressing cell therapy; and
a high level of CD45RO expression (e.g., CD45RO+) and a low level of CCR7 expression (e.g., CCR7−) is indicative or predictive of decreased responsiveness of the subject to the CAR IL-15/IL-15R-expressing cell therapy,
thereby evaluating or predicting the subject's responsiveness to the CAR IL-15/IL-15R expressing cell therapy.

The application's sequence listing, which the Patent Office published only in electronic form, follows.

SEQUENCE LISTING (1482 sequences)

SEQ ID NO: 1-12 - skipped (12 entries)

SEQ ID NO: 13 - DNA, 521 bp, Artificial Sequence
  source: /note="Description of Artificial Sequence: Synthetic polynucleotide"
agcttatggtgccccaaccccaacgcggaaaaggttccgtcgggacccaaacgcgtccctgcgccgacgagacccgcaccaaggccctttgcgtcgccgcggctgggacccagagcgtgtaagaagtgcaggcaagcgtcgcagtgggcctagaagcggcgatgggaacacccggggggccgctgcgaaggacgaggcggggattcagcccttccaaggaacgccaagcgccgcacggcctgcactatttgccttcggcgtgcagagtgatcatgggagcgtctgcctgtcgcggtccctcgttaccgtcgcgcggctggcgctacccgacaccggttatcgccgacgagtcgtcccgcgcggctctcgtcgccggcccttccccgccacgccctccgccccacaccccgccatcacacccgggacaaggacgggcgcgccacaaggcgtaagacgttcggaggcctcgcgtgcagccgtcagccgagggagcaactggcttagtggctggagagaggggt

SEQ ID NO: 14 - DNA, 726 bp, Artificial Sequence
  source: /note="Description of Artificial Sequence: Synthetic polynucleotide"
gacatccagatgacacagactacatcctccctgtctgcctctctgggagacagagtcaccatcagttgcagggcaagtcaggacattagtaaatatttaaattggtatcagcagaaaccagatggaactgttaaactcctgatctaccatacatcaagattacactcaggagtcccatcaaggttcagtggcagtgggtctggaacagattattctctcaccattagcaacctggagcaagaagatattgccacttacttttgccaacagggtaatacgcttccgtacacgttcggaggggggaccaagctggagatcacaggtggcggtggctcgggcggtggtgggtcgggtggcggcggatctgaggtgaaactgcaggagtcaggacctggcctggtggcgccctcacagagcctgtccgtcacatgcactgtctcaggggtctcattacccgactatggtgtaagctggattcgccagcctccacgaaagggtctggagtggctgggagtaatatggggtagtgaaaccacatactataattcagctctcaaatccagactgaccatcatcaaggacaactccaagagccaagttttcttaaaaatgaacagtctgcaaactgatgacacagccatttactactgtgccaaacattattactacggtggtagctatgctatggactactggggccaaggaacctcagtcaccgtctcctca

SEQ ID NO: 15 - protein, 242 aa, Artificial Sequence
  source: /note="Description of Artificial Sequence: Synthetic polypeptide"
DIQMTQTTSSLSASLGDRVTISCRASQDISKYLNWYQQKPDGTVKLLIYHTSRLHSGVPSRFSGSGSGTDYSLTISNLEQEDIATYFCQQGNTLPYTFGGGTKLEITGGGGSGGGGSGGGGSEVKLQESGPGLVAPSQSLSVTCTVSGVSLPDYGVSWIRQPPRKGLEWLGVIWGSETTYYNSALKSRLTIIKDNSKSQVFLKMNSLQTDDTAIYYCAKHYYYGGSYAMDYWGQGTSVTVSS

SEQ ID NO: 16-22 - skipped (7 entries)

SEQ ID NO: 23 - DNA, 66 bp, Artificial Sequence
  source: /note="Description of Artificial Sequence: Synthetic oligonucleotide"
ggaagcggagctactaacttcagcctgctgaagcaggctggagacgtggaggagaaccctggacct

SEQ ID NO: 24 - protein, 22 aa, Artificial Sequence
  source: /note="Description of Artificial Sequence: Synthetic peptide"
GSGATNFSLLKQAGDVEENPGP

SEQ ID NO: 25 - DNA, 1395 bp, Artificial Sequence
  source: /note="Description of Artificial Sequence: Synthetic polynucleotide"
gacatccagatgacacagactacatcctccctgtctgcctctctgggagacagagtcaccatcagttgcagggcaagtcaggacattagtaaatatttaaattggtatcagcagaaaccagatggaactgttaaactcctgatctaccatacatcaagattacactcaggagtcccatcaaggttcagtggcagtgggtctggaacagattattctctcaccattagcaacctggagcaagaagatattgccacttacttttgccaacagggtaatacgcttccgtacacgttcggaggggggaccaagctggagatcacaggtggcggtggctcgggcggtggtgggtcgggtggcggcggatctgaggtgaaactgcaggagtcaggacctggcctggtggcgccctcacagagcctgtccgtcacatgcactgtctcaggggtctcattacccgactatggtgtaagctggattcgccagcctccacgaaagggtctggagtggctgggagtaatatggggtagtgaaaccacatactataattcagctctcaaatccagactgaccatcatcaaggacaactccaagagccaagttttcttaaaaatgaacagtctgcaaactgatgacacagccatttactactgtgccaaacattattactacggtggtagctatgctatggactactggggccaaggaacctcagtcaccgtctcctcaaccacgacgccagcgccgcgaccaccaacaccggcgcccaccatcgcgtcgcagcccctgtccctgcgcccagaggcgtgccggccagcggcggggggcgcagtgcacacgagggggctggacttcgcctgtgatatctacatctgggcgcccttggccgggacttgtggggtccttctcctgtcactggttatcaccctttactgcaaacggggcagaaagaaactcctgtatatattcaaacaaccatttatgagaccagtacaaactactcaagaggaagatggctgtagctgccgatttccagaagaagaagaaggaggatgtgaactgagagtgaagttcagcaggagcgcagacgcccccgcgtacaagcagggccagaaccagctctataacgagctcaatctaggacgaagagaggagtacgatgttttggacaagagacgtggccgggaccctgagatggggggaaagccgagaaggaagaaccctcaggaaggcctgtacaatgaactgcagaaagataagatggcggaggcctacagtgagattgggatgaaaggcgagcgccggaggggcaaggggcacgatggcctttaccagggtctcagtacagccaccaaggacacctacgacgcccttcacatgcaggccctgccccctcgc

SEQ ID NO: 26 - protein, 465 aa, Artificial Sequence
  source: /note="Description of Artificial Sequence: Synthetic polypeptide"
DIQMTQTTSSLSASLGDRVTISCRASQDISKYLNWYQQKPDGTVKLLIYHTSRLHSGVPSRFSGSGSGTDYSLTISNLEQEDIATYFCQQGNTLPYTFGGGTKLEITGGGGSGGGGSGGGGSEVKLQESGPGLVAPSQSLSVTCTVSGVSLPDYGVSWIRQPPRKGLEWLGVIWGSETTYYNSALKSRLTIIKDNSKSQVFLKMNSLQTDDTAIYYCAKHYYYGGSYAMDYWGQGTSVTVSSTTTPAPRPPTPAPTIASQPLSLRPEACRPAAGGAVHTRGLDFACDIYIWAPLAGTCGVLLLSLVITLYCKRGRKKLLYIFKQPFMRPVQTTQEEDGCSCRFPEEEEGGCELRVKFSRSADAPAYKQGQNQLYNELNLGRREEYDVLDKRRGRDPEMGGKPRRKNPQEGLYNELQKDKMAEAYSEIGMKGERRRGKGHDGLYQGLSTATKDTYDALHMQALPPR

SEQ ID NO: 27-38 - skipped (12 entries)

SEQ ID NO: 39 - protein, 246 aa, Artificial Sequence
  source: /note="Description of Artificial Sequence: Synthetic polypeptide"
QVQLVESGGGLVQPGRSLRLSCAASGFTFSNYAMSWVRQAPGKGLGWVSGISRSGENTYYADSVKGRFTISRDNSKNTLYLQMNSLRDEDTAVYYCARSPAHYYGGMDVWGQGTTVTVSSASGGGGSGGRASGGGGSDIVLTQSPGTLSLSPGERATLSCRASQSISSSFLAWYQQKPGQAPRLLIYGASRRATGIPDRFSGSGSGTDFTLTISRLEPEDSAVYYCQQYHSSPSWTFGQGTKLEIK

SEQ ID NO: 40 - protein, 244 aa, Artificial Sequence
  source: /note="Description of Artificial Sequence: Synthetic polypeptide"
QVQLVESGGGLVQPGRSLRLSCAASGFTFDDYAMHWVRQAPGKGLEWVSGISWNSGSIGYADSVKGRFTISRDNAKNSLYLQMNSLRAEDTALYYCSVHSFLAYWGQGTLVTVSSASGGGGSGGRASGGGGSDIVMTQTPLSLPVTPGEPASISCRSSQSLLHSNGYNYLDWYLQKPGQSPQLLIYLGSNRASGVPDRFSGSGSGTDFTLKISRVEAEDVGVYYCMQALQTPYTFGQGTKVEIK

SEQ ID NO: 41 - protein, 243 aa, Artificial Sequence
  source: /note="Description of Artificial Sequence: Synthetic polypeptide"
EVQLLESGGGLVQPGGSLRLSCAVSGFALSNHGMSWVRRAPGKGLEWVSGIVYSGSTYYAASVKGRFTISRDNSRNTLYLQMNSLRPEDTAIYYCSAHGGESDVWGQGTTVTVSSASGGGGSGGRASGGGGSDIVMTQTPLSLSVTPGQPASISCKSSQSLLRNDGKTPLYWYLQKAGQPPQLLIYEVSNRFSGVPDRFSGSGSGTDFTLKISRVEAEDVGAYYCMQNIQFPSFGGGTKLEIK

SEQ ID NO: 42 - protein, 249 aa, Artificial Sequence
  source: /note="Description of Artificial Sequence: Synthetic polypeptide"
QVQLVQSGAEVRKTGASVKVSCKASGYIFDNFGINWVRQAPGQGLEWMGWINPKNNNTNYAQKFQGRVTITADESTNTAYMEVSSLRSEDTAVYYCARGPYYYQSYMDVWGQGTMVTVSSASGGGGSGGRASGGGGSDIVMTQTPLSLPVTPGEPASISCRSSQSLLHSNGYNYLNWYLQKPGQSPQLLIYLGSKRASGVPDRFSGSGSGTDFTLHITRVGAEDVGVYYCMQALQTPYTFGQGTKLEIK

SEQ ID NO: 43 - protein, 246 aa, Artificial Sequence
  source: /note="Description of Artificial Sequence: Synthetic polypeptide"
QVQLQESGGGLVQPGGSLRLSCAASGFTFSSDAMTWVRQAPGKGLEWVSVISGSGGTTYYADSVKGRFTISRDNSKNTLYLQMNSLRAEDTAVYYCAKLDSSGYYYARGPRYWGQGTLVTVSSASGGGGSGGRASGGGGSDIQLTQSPSSLSASVGDRVTITCRASQSISSYLNWYQQKPGKAPKLLIYGASTLASGVPARFSGSGSGTHFTLTINSLQSEDSATYYCQQSYKRASFGQGTKVEIK

SEQ ID NO: 44 - protein, 247 aa, Artificial Sequence
  source: /note="Description of Artificial Sequence: Synthetic polypeptide"
QVQLVQSGAEVKKPGASVKVSCKASGYTFSNYGITWVRQAPGQGLEWMGWISAYNGNTNYAQKFQGRVTMTRNTSISTAYMELSSLRSEDTAVYYCARGPYYYYMDVWGKGTMVTVSSASGGGGSGGRASGGGGSEIVMTQSPLSLPVTPGEPASISCRSSQSLLYSNGYNYVDWYLQKPGQSPQLLIYLGSNRASGVPDRFSGSGSGTDFKLQISRVEAEDVGIYYCMQGRQFPYSFGQGTKVEIK

SEQ ID NO: 45 - protein, 238 aa, Artificial Sequence
  source: /note="Description of Artificial Sequence: Synthetic polypeptide"
EVQLLETGGGLVQPGGSLRLSCAVSGFALSNHGMSWVRRAPGKGLEWVSGIVYSGSTYYAASVKGRFTISRDNSRNTLYLQMNSLRPEDTAIYYCSAHGGESDVWGQGTTVTVSSASGGGGSGGRASGGGGSEIVLTQSPATLSVSPGESATLSCRASQSVSSNLAWYQQKPGQAPRLLIYGASTRASGIPDRFSGSGSGTDFTLTISSLQAEDVAVYYCQQYGSSLTFGGGTKVEIK

SEQ ID NO: 46 - protein, 239 aa, Artificial Sequence
  source: /note="Description of Artificial Sequence: Synthetic polypeptide"
EVQLVETGGGLVQPGGSLRLSCAVSGFALSNHGMSWVRRAPGKGLEWVSGIVYSGSTYYAASVKGRFTISRDNSRNTLYLQMNSLRPEDTAIYYCSAHGGESDVWGQGTTVTVSSASGGGGSGGRASGGGGSEIVMTQSPATLSVSPGERATLSCRASQSVSSKLAWYQQKPGQAPRLLMYGASIRATGIPDRFSGSGSGTEFTLTISSLEPEDFAVYYCQQYGSSSWTFGQGTKVEIK

SEQ ID NO: 47 - protein, 241 aa, Artificial Sequence
  source: /note="Description of Artificial Sequence: Synthetic polypeptide"
EVQLVETGGGVVQPGGSLRLSCAVSGFALSNHGMSWVRRAPGKGLEWVSGIVYSGSTYYAASVKGRFTISRDNSRNTLYLQMNSLRPEDTAIYYCSAHGGESDVWGQGTTVTVSSASGGGGSGGRASGGGGSEIVLTQSPGTLSLSPGERATLSCRASQSVGSTNLAWYQQKPGQAPRLLIYDASNRATGIPDRFSGGGSGTDFTLTISRLEPEDFAVYYCQQYGSSPPWTFGQGTKVEIK

SEQ ID NO: 48 - protein, 239 aa, Artificial Sequence
  source: /note="Description of Artificial Sequence: Synthetic polypeptide"
QVQLVESGGGLVKPGGSLRLSCAASGFTFSDYYMSWIRQAPGKGLEWVSYISSSGSTIYYADSVKGRFTISRDNAKNSLYLQMNSLRAEDTAVYYCARESGDGMDVWGQGTTVTVSSASGGGGSGGRASGGGGSDIQMTQSPSSLSASVGDRVTITCRASQSISSYLNWYQQKPGKAPKLLIYAASSLQSGVPSRFSGSGSGTDFTLTISSLQPEDFATYYCQQSYTLAFGQGTKVDIK

SEQ ID NO: 49 - protein, 239 aa, Artificial Sequence
  source: /note="Description of Artificial Sequence: Synthetic polypeptide"
EVQLVESGGGLVQPGGSLRLSCAVSGFALSNHGMSWVRRAPGKGLEWVSGIVYSGSTYYAASVKGRFTISRDNSRNTLYLQMNSLRPEDTAIYYCSAHGGESDVWGQGTTVTVSSASGGGGSGGRASGGGGSDIQLTQSPSSLSASVGDRVTITCRASQSISSYLNWYQQKPGKAPKLLIYAASSLQSGVPSRFSGSGSGTDFTLTISSLQPEDFATYYCQQSYSTPYTFGQGTKVEIK

SEQ ID NO: 50 - protein, 246 aa, Artificial Sequence
  source: /note="Description of Artificial Sequence: Synthetic polypeptide"
QVQLVQSGGGLVKPGGSLRLSCAASGFTFSDYYMSWIRQAPGKGLEWVSYISSSGNTIYYADSVKGRFTISRDNAKNSLYLQMNSLRAEDTAVYYCARSTMVREDYWGQGTLVTVSSASGGGGSGGRASGGGGSDIVLTQSPLSLPVTLGQPASISCKSSESLVHNSGKTYLNWFHQRPGQSPRRLIYEVSNRDSGVPDRFTGSGSGTDFTLKISRVEAEDVGVYYCMQGTHWPGTFGQGTKLEIK

SEQ ID NO: 51 - protein, 239 aa, Artificial Sequence
  source: /note="Description of Artificial Sequence: Synthetic polypeptide"
QVQLVESGGGLVQPGGSLRLSCAVSGFALSNHGMSWVRRAPGKGLEWVSGIVYSGSTYYAASVKGRFTISRDNSRNTLYLQMNSLRPEDTAIYYCSAHGGESDVWGQGTTVTVSSASGGGGSGGRASGGGGSDIRLTQSPSPLSASVGDRVTITCQASEDINKFLNWYHQTPGKAPKLLIYDASTLQTGVPSRFSGSGSGTDFTLTINSLQPEDIGTYYCQQYESLPLTFGGGTKVEIK

SEQ ID NO: 52 - protein, 240 aa, Artificial Sequence
  source: /note="Description of Artificial Sequence: Synthetic polypeptide"
EVQLVETGGGLVQPGGSLRLSCAVSGFALSNHGMSWVRRAPGKGLEWVSGIVYSGSTYYAASVKGRFTISRDNSRNTLYLQMNSLRPEDTAIYYCSAHGGESDVWGQGTTVTVSSASGGGGSGGRASGGGGSETTLTQSPATLSVSPGERATLSCRASQSVGSNLAWYQQKPGQGPRLLIYGASTRATGIPARFSGSGSGTEFTLTISSLQPEDFAVYYCQQYNDWLPVTFGQGTKVEIK

SEQ ID NO: 53 - protein, 241 aa, Artificial Sequence
  source: /note="Description of Artificial Sequence: Synthetic polypeptide"
EVQLVESGGGLVQPGGSLRLSCAVSGFALSNHGMSWVRRAPGKGLEWVSGIVYSGSTYYAASVKGRFTISRDNSRNTLYLQMNSLRPEDTAIYYCSAHGGESDVWGQGTTVTVSSASGGGGSGGRASGGGGSEIVLTQSPGTLSLSPGERATLSCRASQSIGSSSLAWYQQKPGQAPRLLMYGASSRASGIPDRFSGSGSGTDFTLTISRLEPEDFAVYYCQQYAGSPPFTFGQGTKVEIK

SEQ ID NO: 54 - DNA, 738 bp, Artificial Sequence
  source: /note="Description of Artificial Sequence: Synthetic polynucleotide"
caagtgcaactcgtggaatctggtggaggactcgtgcaacccggaagatcgcttagactgtcgtgtgccgccagcgggttcactttctcgaactacgcgatgtcctgggtccgccaggcacccggaaagggactcggttgggtgtccggcatttcccggtccggcgaaaatacctactacgccgactccgtgaagggccgcttcaccatctcaagggacaacagcaaaaacaccctgtacttgcaaatgaactccctgcgggatgaagatacagccgtgtactattgcgcccggtcgcctgcccattactacggcggaatggacgtctggggacagggaaccactgtgactgtcagcagcgcgtcgggtggcggcggctcagggggtcgggcctccggggggggagggtccgacatcgtgctgacccagtccccgggaaccctgagcctgagcccgggagagcgcgcgaccctgtcatgccgggcatcccagagcattagctcctcctttctcgcctggtatcagcagaagcccggacaggccccgaggctgctgatctacggcgctagcagaagggctaccggaatcccagaccggttctccggctccggttccgggaccgatttcacccttactatctcgcgcctggaacctgaggactccgccgtctactactgccagcagtaccactcatccccgtcgtggacgttcggacagggcaccaagctggagattaag

SEQ ID NO: 55 - DNA, 732 bp, Artificial Sequence
  source: /note="Description of Artificial Sequence: Synthetic polynucleotide"
caagtgcaactcgtcgaatccggtggaggtctggtccaacctggtagaagcctgagactgtcgtgtgcggccagcggattcacctttgatgactatgctatgcactgggtgcggcaggccccaggaaagggcctggaatgggtgtcgggaattagctggaactccgggtccattggctacgccgactccgtgaagggccgcttcaccatctcccgcgacaacgcaaagaactccctgtacttgcaaatgaactcgctcagggctgaggataccgcgctgtactactgctccgtgcattccttcctggcctactggggacagggaactctggtcaccgtgtcgagcgcctccggcggcgggggctcgggtggacgggcctcgggcggaggggggtccgacatcgtgatgacccagaccccgctgagcttgcccgtgactcccggagagcctgcatccatctcctgccggtcatcccagtcccttctccactccaacggatacaactacctcgactggtacctccagaagccgggacagagccctcagcttctgatctacctggggtcaaatagagcctcaggagtgccggatcggttcagcggatctggttcgggaactgatttcactctgaagatttcccgcgtggaagccgaggacgtgggcgtctactactgtatgcaggcgctgcagaccccctataccttcggccaagggacgaaagtggagatcaag

SEQ ID NO: 56 - DNA, 729 bp, Artificial Sequence
  source: /note="Description of Artificial Sequence: Synthetic polynucleotide"
gaagtgcaattgttggaatctggaggaggacttgtgcagcctggaggatcactgagactttcgtgtgcggtgtcaggcttcgccctgagcaaccacggcatgagctgggtgcggagagccccggggaagggtctggaatgggtgtccgggatcgtctactccggttcaacttactacgccgcaagcgtgaagggtcgcttcaccatttcccgcgataactcccggaacaccctgtacctccaaatgaactccctgcggcccgaggacaccgccatctactactgttccgcgcatggaggagagtccgatgtctggggacagggcactaccgtgaccgtgtcgagcgcctcggggggaggaggctccggcggtcgcgcctccggggggggtggcagcgacattgtgatgacgcagactccactctcgctgtccgtgaccccgggacagcccgcgtccatctcgtgcaagagctcccagagcctgctgaggaacgacggaaagactcctctgtattggtacctccagaaggctggacagcccccgcaactgctcatctacgaagtgtcaaatcgcttctccggggtgccggatcggttttccggctcgggatcgggcaccgacttcaccctgaaaatctccagggtcgaggccgaggacgtgggagcctactactgcatgcaaaacatccagttcccttccttcggcggcggcacaaagctggagattaag

SEQ ID NO: 57 - DNA, 747 bp, Artificial Sequence
  source: /note="Description of Artificial Sequence: Synthetic polynucleotide"
caagtccaactcgtccagtccggcgcagaagtcagaaaaaccggtgctagcgtgaaagtgtcctgcaaggcctccggctacattttcgataacttcggaatcaactgggtcagacaggccccgggccaggggctggaatggatgggatggatcaaccccaagaacaacaacaccaactacgcacagaagttccagggccgcgtgactatcaccgccgatgaatcgaccaataccgcctacatggaggtgtcctccctgcggtcggaggacactgccgtgtattactgcgcgaggggcccatactactaccaaagctacatggacgtctggggacagggaaccatggtgaccgtgtcatccgcctccggtggtggaggctccggggggcgggcttcaggaggcggaggaagcgatattgtgatgacccagactccgcttagcctgcccgtgactcctggagaaccggcctccatttcctgccggtcctcgcaatcactcctgcattccaacggttacaactacctgaattggtacctccagaagcctggccagtcgccccagttgctgatctatctgggctcgaagcgcgcctccggggtgcctgaccggtttagcggatctgggagcggcacggacttcactctccacatcacccgcgtgggagcggaggacgtgggagtgtactactgtatgcaggcgctgcagactccgtacacattcggacagggcaccaagctggagatcaag

SEQ ID NO: 58 - DNA, 738 bp, Artificial Sequence
  source: /note="Description of Artificial Sequence: Synthetic polynucleotide"
caagtgcaacttcaagaatcaggcggaggactcgtgcagcccggaggatcattgcggctctcgtgcgccgcctcgggcttcaccttctcgagcgacgccatgacctgggtccgccaggccccggggaaggggctggaatgggtgtctgtgatttccggctccgggggaactacgtactacgccgattccgtgaaaggtcgcttcactatctcccgggacaacagcaagaacaccctttatctgcaaatgaattccctccgcgccgaggacaccgccgtgtactactgcgccaagctggactcctcgggctactactatgcccggggtccgagatactggggacagggaaccctcgtgaccgtgtcctccgcgtccggcggaggagggtcgggagggcgggcctccggcggcggcggttcggacatccagctgacccagtccccatcctcactgagcgcaagcgtgggcgacagagtcaccattacatgcagggcgtcccagagcatcagctcctacctgaactggtaccaacagaagcctggaaaggctcctaagctgttgatctacggggcttcgaccctggcatccggggtgcccgcgaggtttagcggaagcggtagcggcactcacttcactctgaccattaacagcctccagtccgaggattcagccacttactactgtcagcagtcctacaagcgggccagcttcggacagggcactaaggtcgagatcaag

SEQ ID NO: 59 - DNA, 741 bp, Artificial Sequence
  source: /note="Description of Artificial Sequence: Synthetic polynucleotide"
caagtccaactggtccagagcggtgcagaagtgaagaagcccggagcgagcgtgaaagtgtcctgcaaggcttccgggtacaccttctccaactacggcatcacttgggtgcgccaggccccgggacagggcctggaatggatggggtggatttccgcgtacaacggcaatacgaactacgctcagaagttccagggtagagtgaccatgactaggaacacctccatttccaccgcctacatggaactgtcctccctgcggagcgaggacaccgccgtgtactattgcgcccggggaccatactactactacatggatgtctgggggaaggggactatggtcaccgtgtcatccgcctcgggaggcggcggatcaggaggacgcgcctctggtggtggaggatcggagatcgtgatgacccagagccctctctccttgcccgtgactcctggggagcccgcatccatttcatgccggagctcccagtcacttctctactccaacggctataactacgtggattggtacctccaaaagccgggccagagcccgcagctgctgatctacctgggctcgaacagggccagcggagtgcctgaccggttctccgggtcgggaagcgggaccgacttcaagctgcaaatctcgagagtggaggccgaggacgtgggaatctactactgtatgcagggccgccagtttccgtactcgttcggacagggcaccaaagtggaaatcaag

SEQ ID NO: 60 - DNA, 714 bp, Artificial Sequence
  source: /note="Description of Artificial Sequence: Synthetic polynucleotide"
gaagtgcaattgctcgaaactggaggaggtctggtgcaacctggaggatcacttcgcctgtcctgcgccgtgtcgggctttgccctgtccaaccatggaatgagctgggtccgccgcgcgccggggaagggcctcgaatgggtgtccggcatcgtctactccggctccacctactacgccgcgtccgtgaagggccggttcacgatttcacgggacaactcgcggaacaccctgtacctccaaatgaattcccttcggccggaggatactgccatctactactgctccgcccacggtggcgaatccgacgtctggggccagggaaccaccgtgaccgtgtccagcgcgtccgggggaggaggaagcgggggtagagcatcgggtggaggcggatcagagatcgtgctgacccagtcccccgccaccttgagcgtgtcaccaggagagtccgccaccctgtcatgccgcgccagccagtccgtgtcctccaacctggcttggtaccagcagaagccggggcaggcccctagactcctgatctatggggcgtcgacccgggcatctggaattcccgataggttcagcggatcgggctcgggcactgacttcactctgaccatctcctcgctgcaagccgaggacgtggctgtgtactactgtcagcagtacggaagctccctgactttcggtggcgggaccaaagtcgagattaag

SEQ ID NO: 61 - DNA, 717 bp, Artificial Sequence
  source: /note="Description of Artificial Sequence: Synthetic polynucleotide"
gaagtgcaattggtggaaactggaggaggacttgtgcaacctggaggatcattgagactgagctgcgcagtgtcgggattcgccctgagcaaccatggaatgtcctgggtcagaagggcccctggaaaaggcctcgaatgggtgtcagggatcgtgtactccggttccacttactacgccgcctccgtgaaggggcgcttcactatctcacgggataactcccgcaataccctgtacctccaaatgaacagcctgcggccggaggataccgccatctactactgttccgcccacggtggagagtctgacgtctggggccagggaactaccgtgaccgtgtcctccgcgtccggcggtggagggagcggcggccgcgccagcggcggcggaggctccgagatcgtgatgacccagagccccgctactctgtcggtgtcgcccggagaaagggcgaccctgtcctgccgggcgtcgcagtccgtgagcagcaagctggcttggtaccagcagaagccgggccaggcaccacgcctgcttatgtacggtgcctccattcgggccaccggaatcccggaccggttctcggggtcggggtccggtaccgagttcacactgaccatttcctcgctcgagcccgaggactttgccgtctattactgccagcagtacggctcctcctcatggacgttcggccaggggaccaaggtcgaaatcaag

SEQ ID NO: 62 - DNA, 723 bp, Artificial Sequence
  source: /note="Description of Artificial Sequence: Synthetic polynucleotide"
gaagtgcaattggtggagactggaggaggagtggtgcaacctggaggaagcctgagactgtcatgcgcggtgtcgggcttcgccctctccaaccacggaatgtcctgggtccgccgggcccctgggaaaggacttgaatgggtgtccggcatcgtgtactcgggttccacctactacgcggcctcagtgaagggccggtttactattagccgcgacaactccagaaacacactgtacctccaaatgaactcgctgcggccggaagataccgctatctactactgctccgcccatgggggagagtcggacgtctggggacagggcaccactgtcactgtgtccagcgcttccggcggtggtggaagcgggggacgggcctcaggaggcggtggcagcgagattgtgctgacccagtcccccgggaccctgagcctgtccccgggagaaagggccaccctctcctgtcgggcatcccagtccgtggggtctactaaccttgcatggtaccagcagaagcccggccaggcccctcgcctgctgatctacgacgcgtccaatagagccaccggcatcccggatcgcttcagcggaggcggatcgggcaccgacttcaccctcaccatttcaaggctggaaccggaggacttcgccgtgtactactgccagcagtatggttcgtccccaccctggacgttcggccaggggactaaggtcgagatcaag

SEQ ID NO: 63 - DNA, 717 bp, Artificial Sequence
  source: /note="Description of Artificial Sequence: Synthetic polynucleotide"
caagtgcaactcgtggaatctggtggaggactcgtgaaacctggaggatcattgagactgtcatgcgcggcctcgggattcacgttctccgattactacatgagctggattcgccaggctccggggaagggactggaatgggtgtcctacatttcctcatccggctccaccatctactacgcggactccgtgaaggggagattcaccattagccgcgataacgccaagaacagcctgtaccttcagatgaactccctgcgggctgaagatactgccgtctactactgcgcaagggagagcggagatgggatggacgtctggggacagggtaccactgtgaccgtgtcgtcggcctccggcggagggggttcgggtggaagggccagcggcggcggaggcagcgacatccagatgacccagtccccctcatcgctgtccgcctccgtgggcgaccgcgtcaccatcacatgccgggcctcacagtcgatctcctcctacctcaattggtatcagcagaagcccggaaaggcccctaagcttctgatctacgcagcgtcctccctgcaatccggggtcccatctcggttctccggctcgggcagcggtaccgacttcactctgaccatctcgagcctgcagccggaggacttcgccacttactactgtcagcaaagctacaccctcgcgtttggccagggcaccaaagtggacatcaag

SEQ ID NO: 64 - DNA, 717 bp, Artificial Sequence
  source: /note="Description of Artificial Sequence: Synthetic polynucleotide"
gaagtgcaattggtggaatcagggggaggacttgtgcagcctggaggatcgctgagactgtcatgtgccgtgtccggctttgccctgtccaaccacgggatgtcctgggtccgccgcgcgcctggaaagggcctcgaatgggtgtcgggtattgtgtacagcggtagcacctactatgccgcatccgtgaaggggagattcaccatcagccgggacaactccaggaacactctgtacctccaaatgaattcgctgaggccagaggacactgccatctactactgctccgcgcatggcggagagtccgacgtctggggacaggggaccaccgtgaccgtgtctagcgcgtccggcggaggcggcagcgggggtcgggcatcagggggcggcggatcggacatccagctcacccagtccccgagctcgctgtccgcctccgtgggagatcgggtcaccatcacgtgccgcgccagccagtcgatttcctcctacctgaactggtaccaacagaagcccggaaaagccccgaagcttctcatctacgccgcctcgagcctgcagtcaggagtgccctcacggttctccggctccggttccggtactgatttcaccctgaccatttcctccctgcaaccggaggacttcgctacttactactgccagcagtcgtactccaccccctacactttcggacaaggcaccaaggtcgaaatcaag

SEQ ID NO: 65 - DNA, 738 bp, Artificial Sequence
  source: /note="Description of Artificial Sequence: Synthetic polynucleotide"
caagtgcaactggtgcaaagcggaggaggattggtcaaacccggaggaagcctgagactgtcatgcgcggcctctggattcaccttctccgattactacatgtcatggatcagacaggccccggggaagggcctcgaatgggtgtcctacatctcgtcctccgggaacaccatctactacgccgacagcgtgaagggccgctttaccatttcccgcgacaacgcaaagaactcgctgtaccttcagatgaattccctgcgggctgaagataccgcggtgtactattgcgcccggtccactatggtccgggaggactactggggacagggcacactcgtgaccgtgtccagcgcgagcgggggtggaggcagcggtggacgcgcctccggcggcggcggttcagacatcgtgctgactcagtcgcccctgtcgctgccggtcaccctgggccaaccggcctcaattagctgcaagtcctcggagagcctggtgcacaactcaggaaagacttacctgaactggttccatcagcggcctggacagtccccacggaggctcatctatgaagtgtccaacagggattcgggggtgcccgaccgcttcactggctccgggtccggcaccgacttcaccttgaaaatctccagagtggaagccgaggacgtgggcgtgtactactgtatgcagggtacccactggcctggaacctttggacaaggaactaagctcgagattaag

SEQ ID NO: 66 - DNA, 717 bp, Artificial Sequence
  source: /note="Description of Artificial Sequence: Synthetic polynucleotide"
caagtgcaactcgtggaatctggtggaggactcgtgcaacccggtggaagccttaggctgtcgtgcgccgtcagcgggtttgctctgagcaaccatggaatgtcctgggtccgccgggcaccgggaaaagggctggaatgggtgtccggcatcgtgtacagcgggtcaacctattacgccgcgtccgtgaagggcagattcactatctcaagagacaacagccggaacaccctgtacttgcaaatgaattccctgcgccccgaggacaccgccatctactactgctccgcccacggaggagagtcggacgtgtggggccagggaacgactgtgactgtgtccagcgcatcaggagggggtggttcgggcggccgggcctcggggggaggaggttccgacattcggctgacccagtccccgtccccactgtcggcctccgtcggcgaccgcgtgaccatcacttgtcaggcgtccgaggacattaacaagttcctgaactggtaccaccagacccctggaaaggcccccaagctgctgatctacgatgcctcgacccttcaaactggagtgcctagccggttctccgggtccggctccggcactgatttcactctgaccatcaactcattgcagccggaagatatcgggacctactattgccagcagtacgaatccctcccgctcacattcggcgggggaaccaaggtcgagattaag

SEQ ID NO: 67 - DNA, 720 bp, Artificial Sequence
  source: /note="Description of Artificial Sequence: Synthetic polynucleotide"
gaagtgcaattggtggaaactggaggaggacttgtgcaacctggaggatcattgcggctctcatgcgctgtctccggcttcgccctgtcaaatcacgggatgtcgtgggtcagacgggccccgggaaagggtctggaatgggtgtcggggattgtgtacagcggctccacctactacgccgcttcggtcaagggccgcttcactatttcacgggacaacagccgcaacaccctctatctgcaaatgaactctctccgcccggaggataccgccatctactactgctccgcacacggcggcgaatccgacgtgtggggacagggaaccactgtcaccgtgtcgtccgcatccggtggcggaggatcgggtggccgggcctccgggggcggcggcagcgagactaccctgacccagtcccctgccactctgtccgtgagcccgggagagagagccacccttagctgccgggccagccagagcgtgggctccaacctggcctggtaccagcagaagccaggacagggtcccaggctgctgatctacggagcctccactcgcgcgaccggcatccccgcgaggttctccgggtcgggttccgggaccgagttcaccctgaccatctcctccctccaaccggaggacttcgcggtgtactactgtcagcagtacaacgattggctgcccgtgacatttggacaggggacgaaggtggaaatcaaa

SEQ ID NO: 68 - DNA, 723 bp, Artificial Sequence
  source: /note="Description of Artificial Sequence: Synthetic polynucleotide"
gaagtgcaattggtggaatctggtggaggacttgtgcaacctggaggatcactgagactgtcatgcgcggtgtccggttttgccctgagcaatcatgggatgtcgtgggtccggcgcgcccccggaaagggtctggaatgggtgtcgggtatcgtctactccgggagcacttactacgccgcgagcgtgaagggccgcttcaccatttcccgcgataactcccgcaacaccctgtacttgcaaatgaactcgctccggcctgaggacactgccatctactactgctccgcacacggaggagaatccgacgtgtggggccagggaactaccgtgaccgtcagcagcgcctccggcggcgggggctcaggcggacgggctagcggcggcggtggctccgagatcgtgctgacccagtcgcctggcactctctcgctgagccccggggaaagggcaaccctgtcctgtcgggccagccagtccattggatcatcctccctcgcctggtatcagcagaaaccgggacaggctccgcggctgcttatgtatggggccagctcaagagcctccggcattcccgaccggttctccgggtccggttccggcaccgatttcaccctgactatctcgaggctggagccagaggacttcgccgtgtactactgccagcagtacgcggggtccccgccgttcacgttcggacagggaaccaaggtcgagatcaag

SEQ ID NO: 69 - protein, 120 aa, Artificial Sequence
  source: /note="Description of Artificial Sequence: Synthetic polypeptide"
QVQLVESGGGLVQPGRSLRLSCAASGFTFSNYAMSWVRQAPGKGLGWVSGISRSGENTYYADSVKGRFTISRDNSKNTLYLQMNSLRDEDTAVYYCARSPAHYYGGMDVWGQGTTVTVSS

SEQ ID NO: 70 - protein, 115 aa, Artificial Sequence
  source: /note="Description of Artificial Sequence: Synthetic polypeptide"
QVQLVESGGGLVQPGRSLRLSCAASGFTFDDYAMHWVRQAPGKGLEWVSGISWNSGSIGYADSVKGRFTISRDNAKNSLYLQMNSLRAEDTALYYCSVHSFLAYWGQGTLVTVSS

SEQ ID NO: 71 - protein, 115 aa, Artificial Sequence
  source: /note="Description of Artificial Sequence: Synthetic polypeptide"
EVQLLESGGGLVQPGGSLRLSCAVSGFALSNHGMSWVRRAPGKGLEWVSGIVYSGSTYYAASVKGRFTISRDNSRNTLYLQMNSLRPEDTAIYYCSAHGGESDVWGQGTTVTVSS

SEQ ID NO: 72 - protein, 120 aa, Artificial Sequence
  source: /note="Description of Artificial Sequence: Synthetic polypeptide"
QVQLVQSGAEVRKTGASVKVSCKASGYIFDNFGINWVRQAPGQGLEWMGWINPKNNNTNYAQKFQGRVTITADESTNTAYMEVSSLRSEDTAVYYCARGPYYYQSYMDVWGQGTMVTVSS

SEQ ID NO: 73 - protein, 123 aa, Artificial Sequence
  source: /note="Description of Artificial Sequence: Synthetic polypeptide"
QVQLQESGGGLVQPGGSLRLSCAASGFTFSSDAMTWVRQAPGKGLEWVSVISGSGGTTYYADSVKGRFTISRDNSKNTLYLQMNSLRAEDTAVYYCAKLDSSGYYYARGPRYWGQGTLVTVSS

SEQ ID NO: 74 - protein, 118 aa, Artificial Sequence
  source: /note="Description of Artificial Sequence: Synthetic polypeptide"
QVQLVQSGAEVKKPGASVKVSCKASGYTFSNYGITWVRQAPGQGLEWMGWISAYNGNTNYAQKFQGRVTMTRNTSISTAYMELSSLRSEDTAVYYCARGPYYYYMDVWGKGTMVTVSS

SEQ ID NO: 75 - protein, 115 aa, Artificial Sequence
  source: /note="Description of Artificial Sequence: Synthetic polypeptide"
EVQLLETGGGLVQPGGSLRLSCAVSGFALSNHGMSWVRRAPGKGLEWVSGIVYSGSTYYAASVKGRFTISRDNSRNTLYLQMNSLRPEDTAIYYCSAHGGESDVWGQGTTVTVSS

SEQ ID NO: 76 - protein, 115 aa, Artificial Sequence
  source: /note="Description of Artificial Sequence: Synthetic polypeptide"
EVQLVETGGGLVQPGGSLRLSCAVSGFALSNHGMSWVRRAPGKGLEWVSGIVYSGSTYYAASVKGRFTISRDNSRNTLYLQMNSLRPEDTAIYYCSAHGGESDVWGQGTTVTVSS

SEQ ID NO: 77 - protein, 115 aa, Artificial Sequence
  source: /note="Description of Artificial Sequence: Synthetic polypeptide"
EVQLVETGGGVVQPGGSLRLSCAVSGFALSNHGMSWVRRAPGKGLEWVSGIVYSGSTYYAASVKGRFTISRDNSRNTLYLQMNSLRPEDTAIYYCSAHGGESDVWGQGTTVTVSS

SEQ ID NO: 78 - protein, 117 aa, Artificial Sequence
  source: /note="Description of Artificial Sequence: Synthetic polypeptide"
QVQLVESGGGLVKPGGSLRLSCAASGFTFSDYYMSWIRQAPGKGLEWVSYISSSGSTIYYADSVKGRFTISRDNAKNSLYLQMNSLRAEDTAVYYCARESGDGMDVWGQGTTVTVSS

SEQ ID NO: 79 - protein, 115 aa, Artificial Sequence
  source: /note="Description of Artificial Sequence: Synthetic polypeptide"
EVQLVESGGGLVQPGGSLRLSCAVSGFALSNHGMSWVRRAPGKGLEWVSGIVYSGSTYYAASVKGRFTISRDNSRNTLYLQMNSLRPEDTAIYYCSAHGGESDVWGQGTTVTVSS

SEQ ID NO: 80 - protein, 117 aa, Artificial Sequence
  source: /note="Description of Artificial Sequence: Synthetic polypeptide"
QVQLVQSGGGLVKPGGSLRLSCAASGFTFSDYYMSWIRQAPGKGLEWVSYISSSGNTIYYADSVKGRFTISRDNAKNSLYLQMNSLRAEDTAVYYCARSTMVREDYWGQGTLVTVSS

SEQ ID NO: 81 - protein, 115 aa, Artificial Sequence
  source: /note="Description of Artificial Sequence: Synthetic polypeptide"
QVQLVESGGGLVQPGGSLRLSCAVSGFALSNHGMSWVRRAPGKGLEWVSGIVYSGSTYYAASVKGRFTISRDNSRNTLYLQMNSLRPEDTAIYYCSAHGGESDVWGQGTTVTVSS

SEQ ID NO: 82 - protein, 115 aa, Artificial Sequence; identical to SEQ ID NO: 76
  source: /note="Description of Artificial Sequence: Synthetic polypeptide"

SEQ ID NO: 83 - protein, 115 aa, Artificial Sequence; identical to SEQ ID NO: 79
  source: /note="Description of Artificial Sequence: Synthetic polypeptide"

SEQ ID NO: 84 - protein, 109 aa, Artificial Sequence
  source: /note="Description of Artificial Sequence: Synthetic polypeptide"
DIVLTQSPGTLSLSPGERATLSCRASQSISSSFLAWYQQKPGQAPRLLIYGASRRATGIPDRFSGSGSGTDFTLTISRLEPEDSAVYYCQQYHSSPSWTFGQGTKLEIK

SEQ ID NO: 85 - protein, 112 aa, Artificial Sequence
  source: /note="Description of Artificial Sequence: Synthetic polypeptide"
DIVMTQTPLSLPVTPGEPASISCRSSQSLLHSNGYNYLDWYLQKPGQSPQLLIYLGSNRASGVPDRFSGSGSGTDFTLKISRVEAEDVGVYYCMQALQTPYTFGQGTKVEIK

SEQ ID NO: 86 - protein, 111 aa, Artificial Sequence
  source: /note="Description of Artificial Sequence: Synthetic polypeptide"
DIVMTQTPLSLSVTPGQPASISCKSSQSLLRNDGKTPLYWYLQKAGQPPQLLIYEVSNRFSGVPDRFSGSGSGTDFTLKISRVEAEDVGAYYCMQNIQFPSFGGGTKLEIK

SEQ ID NO: 87 - protein, 112 aa, Artificial Sequence
  source: /note="Description of Artificial Sequence: Synthetic polypeptide"
DIVMTQTPLSLPVTPGEPASISCRSSQSLLHSNGYNYLNWYLQKPGQSPQLLIYLGSKRASGVPDRFSGSGSGTDFTLHITRVGAEDVGVYYCMQALQTPYTFGQGTKLEIK

SEQ ID NO: 88 - protein, 106 aa, Artificial Sequence
  source: /note="Description of Artificial Sequence: Synthetic polypeptide"
DIQLTQSPSSLSASVGDRVTITCRASQSISSYLNWYQQKPGKAPKLLIYGASTLASGVPARFSGSGSGTHFTLTINSLQSEDSATYYCQQSYKRASFGQGTKVEIK

SEQ ID NO: 89 - protein, 112 aa, Artificial Sequence
  source: /note="Description of Artificial Sequence: Synthetic polypeptide"
EIVMTQSPLSLPVTPGEPASISCRSSQSLLYSNGYNYVDWYLQKPGQSPQLLIYLGSNRASGVPDRFSGSGSGTDFKLQISRVEAEDVGIYYCMQGRQFPYSFGQGTKVEIK

SEQ ID NO: 90 - protein, 106 aa, Artificial Sequence
  source: /note="Description of Artificial Sequence: Synthetic polypeptide"
EIVLTQSPATLSVSPGESATLSCRASQSVSSNLAWYQQKPGQAPRLLIYGASTRASGIPDRFSGSGSGTDFTLTISSLQAEDVAVYYCQQYGSSLTFGGGTKVEIK

SEQ ID NO: 91 - protein, 107 aa, Artificial Sequence
  source: /note="Description of Artificial Sequence: Synthetic polypeptide"
EIVMTQSPATLSVSPGERATLSCRASQSVSSKLAWYQQKPGQAPRLLMYGASIRATGIPDRFSGSGSGTEFTLTISSLEPEDFAVYYCQQYGSSSWTFGQGTKVEIK

SEQ ID NO: 92 - protein, 109 aa, Artificial Sequence
  source: /note="Description of Artificial Sequence: Synthetic polypeptide"
EIVLTQSPGTLSLSPGERATLSCRASQSVGSTNLAWYQQKPGQAPRLLIYDASNRATGIPDRFSGGGSGTDFTLTISRLEPEDFAVYYCQQYGSSPPWTFGQGTKVEIK

SEQ ID NO: 93 - protein, 105 aa, Artificial Sequence
  source: /note="Description of Artificial Sequence: Synthetic polypeptide"
DIQMTQSPSSLSASVGDRVTITCRASQSISSYLNWYQQKPGKAPKLLIYAASSLQSGVPSRFSGSGSGTDFTLTISSLQPEDFATYYCQQSYTLAFGQGTKVDIK

SEQ ID NO: 94 - protein, 107 aa, Artificial Sequence
  source: /note="Description of Artificial Sequence: Synthetic polypeptide"
DIQLTQSPSSLSASVGDRVTITCRASQSISSYLNWYQQKPGKAPKLLIYAASSLQSGVPSRFSGSGSGTDFTLTISSLQPEDFATYYCQQSYSTPYTFGQGTKVEIK

SEQ ID NO: 95 - protein, 112 aa, Artificial Sequence
  source: /note="Description of Artificial Sequence: Synthetic polypeptide"
DIVLTQSPLSLPVTLGQPASISCKSSESLVHNSGKTYLNWFHQRPGQSPRRLIYEVSNRDSGVPDRFTGSGSGTDFTLKISRVEAEDVGVYYCMQGTHWPGTFGQGTKLEIK

SEQ ID NO: 96 - protein, 107 aa, Artificial Sequence
  source: /note="Description of Artificial Sequence: Synthetic polypeptide"
DIRLTQSPSPLSASVGDRVTITCQASEDINKFLNWYHQTPGKAPKLLIYDASTLQTGVPSRFSGSGSGTDFTLTINSLQPEDIGTYYCQQYESLPLTFGGGTKVEIK

SEQ ID NO: 97 - protein, 108 aa, Artificial Sequence
  source: /note="Description of Artificial Sequence: Synthetic polypeptide"
ETTLTQSPATLSVSPGERATLSCRASQSVGSNLAWYQQKPGQGPRLLIYGASTRATGIPARFSGSGSGTEFTLTISSLQPEDFAVYYCQQYNDWLPVTFGQGTKVEIK

SEQ ID NO: 98 - protein, 109 aa, Artificial Sequence
  source: /note="Description of Artificial Sequence: Synthetic polypeptide"
EIVLTQSPGTLSLSPGERATLSCRASQSIGSSSLAWYQQKPGQAPRLLMYGASSRASGIPDRFSGSGSGTDFTLTISRLEPEDFAVYYCQQYAGSPPFTFGQGTKVEIK

SEQ ID NO: 99 - protein, 490 aa, Artificial Sequence
  source: /note="Description of Artificial Sequence: Synthetic polypeptide"
MALPVTALLLPLALLLHAARPQVQLVESGGGLVQPGRSLRLSCAASGFTFSNYAMSWVRQAPGKGLGWVSGISRSGENTYYADSVKGRFTISRDNSKNTLYLQMNSLRDEDTAVYYCARSPAHYYGGMDVWGQGTTVTVSSASGGGGSGGRASGGGGSDIVLTQSPGTLSLSPGERATLSCRASQSISSSFLAWYQQKPGQAPRLLIYGASRRATGIPDRFSGSGSGTDFTLTISRLEPEDSAVYYCQQYHSSPSWTFGQGTKLEIKTTTPAPRPPTPAPTIASQPLSLRPEACRPAAGGAVHTRGLDFACDIYIWAPLAGTCGVLLLSLVITLYCKRGRKKLLYIFKQPFMRPVQTTQEEDGCSCRFPEEEEGGCELRVKFSRSADAPAYKQGQNQLYNELNLGRREEYDVLDKRRGRDPEMGGKPRRKNPQEGLYNELQKDKMAEAYSEIGMKGERRRGKGHDGLYQGLSTATKDTYDALHMQALPPR

SEQ ID NO: 100 - protein, 488 aa, Artificial Sequence
  source: /note="Description of Artificial Sequence: Synthetic polypeptide"
MALPVTALLLPLALLLHAARPQVQLVESGGGLVQPGRSLRLSCAASGFTFDDYAMHWVRQAPGKGLEWVSGISWNSGSIGYADSVKGRFTISRDNAKNSLYLQMNSLRAEDTALYYCSVHSFLAYWGQGTLVTVSSASGGGGSGGRASGGGGSDIVMTQTPLSLPVTPGEPASISCRSSQSLLHSNGYNYLDWYLQKPGQSPQLLIYLGSNRASGVPDRFSGSGSGTDFTLKISRVEAEDVGVYYCMQALQTPYTFGQGTKVEIKTTTPAPRPPTPAPTIASQPLSLRPEACRPAAGGAVHTRGLDFACDIYIWAPLAGTCGVLLLSLVITLYCKRGRKKLLYIFKQPFMRPVQTTQEEDGCSCRFPEEEEGGCELRVKFSRSADAPAYKQGQNQLYNELNLGRREEYDVLDKRRGRDPEMGGKPRRKNPQEGLYNELQKDKMAEAYSEIGMKGERRRGKGHDGLYQGLSTATKDTYDALHMQALPPR

SEQ ID NO: 101 - protein, 487 aa, Artificial Sequence
  source: /note="Description of Artificial Sequence: Synthetic polypeptide"
MALPVTALLLPLALLLHAARPEVQLLESGGGLVQPGGSLRLSCAVSGFALSNHGMSWVRRAPGKGLEWVSGIVYSGSTYYAASVKGRFTISRDNSRNTLYLQMNSLRPEDTAIYYCSAHGGESDVWGQGTTVTVSSASGGGGSGGRASGGGGSDIVMTQTPLSLSVTPGQPASISCKSSQSLLRNDGKTPLYWYLQKAGQPPQLLIYEVSNRFSGVPDRFSGSGSGTDFTLKISRVEAEDVGAYYCMQNIQFPSFGGGTKLEIKTTTPAPRPPTPAPTIASQPLSLRPEACRPAAGGAVHTRGLDFACDIYIWAPLAGTCGVLLLSLVITLYCKRGRKKLLYIFKQPFMRPVQTTQEEDGCSCRFPEEEEGGCELRVKFSRSADAPAYKQGQNQLYNELNLGRREEYDVLDKRRGRDPEMGGKPRRKNPQEGLYNELQKDKMAEAYSEIGMKGERRRGKGHDGLYQGLSTATKDTYDALHMQALPPR

SEQ ID NO: 102 - protein, 493 aa, Artificial Sequence
  source: /note="Description of Artificial Sequence: Synthetic polypeptide"
MALPVTALLLPLALLLHAARPQVQLVQSGAEVRKTGASVKVSCKASGYIFDNFGINWVRQAPGQGLEWMGWINPKNNNTNYAQKFQGRVTITADESTNTAYMEVSSLRSEDTAVYYCARGPYYYQSYMDVWGQGTMVTVSSASGGGGSGGRASGGGGSDIVMTQTPLSLPVTPGEPASISCRSSQSLLHSNGYNYLNWYLQKPGQSPQLLIYLGSKRASGVPDRFSGSGSGTDFTLHITRVGAEDVGVYYCMQALQTPYTFGQGTKLEIKTTTPAPRPPTPAPTIASQPLSLRPEACRPAAGGAVHTRGLDFACDIYIWAPLAGTCGVLLLSLVITLYCKRGRKKLLYIFKQPFMRPVQTTQEEDGCSCRFPEEEEGGCELRVKFSRSADAPAYKQGQNQLYNELNLGRREEYDVLDKRRGRDPEMGGKPRRKNPQEGLYNELQKDKMAEAYSEIGMKGERRRGKGHDGLYQGLSTATKDTYDALHMQALPPR

SEQ ID NO: 103 - protein, 490 aa, Artificial Sequence
  source: /note="Description of Artificial Sequence: Synthetic polypeptide"
MALPVTALLLPLALLLHAARPQVQLQESGGGLVQPGGSLRLSCAASGFTFSSDAMTWVRQAPGKGLEWVSVISGSGGTTYYADSVKGRFTISRDNSKNTLYLQMNSLRAEDTAVYYCAKLDSSGYYYARGPRYWGQGTLVTVSSASGGGGSGGRASGGGGSDIQLTQSPSSLSASVGDRVTITCRASQSISSYLNWYQQKPGKAPKLLIYGASTLASGVPARFSGSGSGTHFTLTINSLQSEDSATYYCQQSYKRASFGQGTKVEIKTTTPAPRPPTPAPTIASQPLSLRPEACRPAAGGAVHTRGLDFACDIYIWAPLAGTCGVLLLSLVITLYCKRGRKKLLYIFKQPFMRPVQTTQEEDGCSCRFPEEEEGGCELRVKFSRSADAPAYKQGQNQLYNELNLGRREEYDVLDKRRGRDPEMGGKPRRKNPQEGLYNELQKDKMAEAYSEIGMKGERRRGKGHDGLYQGLSTATKDTYDALHMQALPPR

SEQ ID NO: 104 - protein, 491 aa, Artificial Sequence
  source: /note="Description of Artificial Sequence: Synthetic polypeptide"
MALPVTALLLPLALLLHAARPQVQLVQSGAEVKKPGASVKVSCKASGYTFSNYGITWVRQAPGQGLEWMGWISAYNGNTNYAQKFQGRVTMTRNTSISTAYMELSSLRSEDTAVYYCARGPYYYYMDVWGKGTMVTVSSASGGGGSGGRASGGGGSEIVMTQSPLSLPVTPGEPASISCRSSQSLLYSNGYNYVDWYLQKPGQSPQLLIYLGSNRASGVPDRFSGSGSGTDFKLQISRVEAEDVGIYYCMQGRQFPYSFGQGTKVEIKTTTPAPRPPTPAPTIASQPLSLRPEACRPAAGGAVHTRGLDFACDIYIWAPLAGTCGVLLLSLVITLYCKRGRKKLLYIFKQPFMRPVQTTQEEDGCSCRFPEEEEGGCELRVKFSRSADAPAYKQGQNQLYNELNLGRREEYDVLDKRRGRDPEMGGKPRRKNPQEGLYNELQKDKMAEAYSEIGMKGERRRGKGHDGLYQGLSTATKDTYDALHMQALPPR

SEQ ID NO: 105 - protein, 482 aa, Artificial Sequence
  source: /note="Description of Artificial Sequence: Synthetic polypeptide"
MALPVTALLLPLALLLHAARPEVQLLETGGGLVQPGGSLRLSCAVSGFALSNHGMSWVRRAPGKGLEWVSGIVYSGSTYYAASVKGRFTISRDNSRNTLYLQMNSLRPEDTAIYYCSAHGGESDVWGQGTTVTVSSASGGGGSGGRASGGGGSEIVLTQSPATLSVSPGESATLSCRASQSVSSNLAWYQQKPGQAPRLLIYGASTRASGIPDRFSGSGSGTDFTLTISSLQAEDVAVYYCQQYGSSLTFGGGTKVEIKTTTPAPRPPTPAPTIASQPLSLRPEACRPAAGGAVHTRGLDFACDIYIWAPLAGTCGVLLLSLVITLYCKRGRKKLLYIFKQPFMRPVQTTQEEDGCSCRFPEEEEGGCELRVKFSRSADAPAYKQGQNQLYNELNLGRREEYDVLDKRRGRDPEMGGKPRRKNPQEGLYNELQKDKMAEAYSEIGMKGERRRGKGHDGLYQGLSTATKDTYDALHMQALPPR

SEQ ID NO: 106 - protein, 483 aa, Artificial Sequence
  source: /note="Description of Artificial Sequence: Synthetic polypeptide"
MALPVTALLLPLALLLHAARPEVQLVETGGGLVQPGGSLRLSCAVSGFALSNHGMSWVRRAPGKGLEWVSGIVYSGSTYYAASVKGRFTISRDNSRNTLYLQMNSLRPEDTAIYYCSAHGGESDVWGQGTTVTVSSASGGGGSGGRASGGGGSEIVMTQSPATLSVSPGERATLSCRASQSVSSKLAWYQQKPGQAPRLLMYGASIRATGIPDRFSGSGSGTEFTLTISSLEPEDFAVYYCQQYGSSSWTFGQGTKVEIKTTTPAPRPPTPAPTIASQPLSLRPEACRPAAGGAVHTRGLDFACDIYIWAPLAGTCGVLLLSLVITLYCKRGRKKLLYIFKQPFMRPVQTTQEEDGCSCRFPEEEEGGCELRVKFSRSADAPAYKQGQNQLYNELNLGRREEYDVLDKRRGRDPEMGGKPRRKNPQEGLYNELQKDKMAEAYSEIGMKGERRRGKGHDGLYQGLSTATKDTYDALHMQALPPR

SEQ ID NO: 107 - protein, 485 aa, Artificial Sequence
  source: /note="Description of Artificial Sequence: Synthetic polypeptide"
MALPVTALLLPLALLLHAARPEVQLVETGGGVVQPGGSLRLSCAVSGFALSNHGMSWVRRAPGKGLEWVSGIVYSGSTYYAASVKGRFTISRDNSRNTLYLQMNSLRPEDTAIYYCSAHGGESDVWGQGTTVTVSSASGGGGSGGRASGGGGSEIVLTQSPGTLSLSPGERATLSCRASQSVGSTNLAWYQQKPGQAPRLLIYDASNRATGIPDRFSGGGSGTDFTLTISRLEPEDFAVYYCQQYGSSPPWTFGQGTKVEIKTTTPAPRPPTPAPTIASQPLSLRPEACRPAAGGAVHTRGLDFACDIYIWAPLAGTCGVLLLSLVITLYCKRGRKKLLYIFKQPFMRPVQTTQEEDGCSCRFPEEEEGGCELRVKFSRSADAPAYKQGQNQLYNELNLGRREEYDVLDKRRGRDPEMGGKPRRKNPQEGLYNELQKDKMAEAYSEIGMKGERRRGKGHDGLYQGLSTATKDTYDALHMQALPPR

SEQ ID NO: 108 - protein, 483 aa, Artificial Sequence
  source: /note="Description of Artificial Sequence: Synthetic polypeptide"
MALPVTALLLPLALLLHAARPQVQLVESGGGLVKPGGSLRLSCAASGFTFSDYYMSWIRQAPGKGLEWVSYISSSGSTIYYADSVKGRFTISRDNAKNSLYLQMNSLRAEDTAVYYCARESGDGMDVWGQGTTVTVSSASGGGGSGGRASGGGGSDIQMTQSPSSLSASVGDRVTITCRASQSISSYLNWYQQKPGKAPKLLIYAASSLQSGVPSRFSGSGSGTDFTLTISSLQPEDFATYYCQQSYTLAFGQGTKVDIKTTTPAPRPPTPAPTIASQPLSLRPEACRPAAGGAVHTRGLDFACDIYIWAPLAGTCGVLLLSLVITLYCKRGRKKLLYIFKQPFMRPVQTTQEEDGCSCRFPEEEEGGCELRVKFSRSADAPAYKQGQNQLYNELNLGRREEYDVLDKRRGRDPEMGGKPRRKNPQEGLYNELQKDKMAEAYSEIGMKGERRRGKGHDGLYQGLSTATKDTYDALHMQALPPR

SEQ ID NO: 109 - protein, 483 aa, Artificial Sequence
  source: /note="Description of Artificial Sequence: Synthetic polypeptide"
MALPVTALLLPLALLLHAARPEVQLVESGGGLVQPGGSLRLSCAVSGFALSNHGMSWVRRAPGKGLEWVSGIVYSGSTYYAASVKGRFTISRDNSRNTLYLQMNSLRPEDTAIYYCSAHGGESDVWGQGTTVTVSSASGGGGSGGRASGGGGSDIQLTQSPSSLSASVGDRVTITCRASQSISSYLNWYQQKPGKAPKLLIYAASSLQSGVPSRFSGSGSGTDFTLTISSLQPEDFATYYCQQSYSTPYTFGQGTKVEIKTTTPAPRPPTPAPTIASQPLSLRPEACRPAAGGAVHTRGLDFACDIYIWAPLAGTCGVLLLSLVITLYCKRGRKKLLYIFKQPFMRPVQTTQEEDGCSCRFPEEEEGGCELRVKFSRSADAPAYKQGQNQLYNELNLGRREEYDVLDKRRGRDPEMGGKPRRKNPQEGLYNELQKDKMAEAYSEIGMKGERRRGKGHDGLYQGLSTATKDTYDALHMQALPPR

SEQ ID NO: 110 - protein, 490 aa, Artificial Sequence
  source: /note="Description of Artificial Sequence: Synthetic polypeptide"
MALPVTALLLPLALLLHAARPQVQLVQSGGGLVKPGGSLRLSCAASGFTFSDYYMSWIRQAPGKGLEWVSYISSSGNTIYYADSVKGRFTISRDNAKNSLYLQMNSLRAEDTAVYYCARSTMVREDYWGQGTLVTVSSASGGGGSGGRASGGGGSDIVLTQSPLSLPVTLGQPASISCKSSESLVHNSGKTYLNWFHQRPGQSPRRLIYEVSNRDSGVPDRFTGSGSGTDFTLKISRVEAEDVGVYYCMQGTHWPGTFGQGTKLEIKTTTPAPRPPTPAPTIASQPLSLRPEACRPAAGGAVHTRGLDFACDIYIWAPLAGTCGVLLLSLVITLYCKRGRKKLLYIFKQPFMRPVQTTQEEDGCSCRFPEEEEGGCELRVKFSRSADAPAYKQGQNQLYNELNLGRREEYDVLDKRRGRDPEMGGKPRRKNPQEGLYNELQKDKMAEAYSEIGMKGERRRGKGHDGLYQGLSTATKDTYDALHMQALPPR

SEQ ID NO: 111 - protein, 483 aa, Artificial Sequence
  source: /note="Description of Artificial Sequence: Synthetic polypeptide"
MALPVTALLLPLALLLHAARPQVQLVESGGGLVQPGGSLRLSCAVSGFALSNHGMSWVRRAPGKGLEWVSGIVYSGSTYYAASVKGRFTISRDNSRNTLYLQMNSLRPEDTAIYYCSAHGGESDVWGQGTTVTVSSASGGGGSGGRASGGGGSDIRLTQSPSPLSASVGDRVTITCQASEDINKFLNWYHQTPGKAPKLLIYDASTLQTGVPSRFSGSGSGTDFTLTINSLQPEDIGTYYCQQYESLPLTFGGGTKVEIKTTTPAPRPPTPAPTIASQPLSLRPEACRPAAGGAVHTRGLDFACDIYIWAPLAGTCGVLLLSLVITLYCKRGRKKLLYIFKQPFMRPVQTTQEEDGCSCRFPEEEEGGCELRVKFSRSADAPAYKQGQNQLYNELNLGRREEYDVLDKRRGRDPEMGGKPRRKNPQEGLYNELQKDKMAEAYSEIGMKGERRRGKGHDGLYQGLSTATKDTYDALHMQALPPR

SEQ ID NO: 112 - protein, 484 aa, Artificial Sequence
  source: /note="Description of Artificial Sequence: Synthetic polypeptide"
MALPVTALLLPLALLLHAARPEVQLVETGGGLVQPGGSLRLSCAVSGFALSNHGMSWVRRAPGKGLEWVSGIVYSGSTYYAASVKGRFTISRDNSRNTLYLQMNSLRPEDTAIYYCSAHGGESDVWGQGTTVTVSSASGGGGSGGRASGGGGSETTLTQSPATLSVSPGERATLSCRASQSVGSNLAWYQQKPGQGPRLLIYGASTRATGIPARFSGSGSGTEFTLTISSLQPEDFAVYYCQQYNDWLPVTFGQGTKVEIKTTTPAPRPPTPAPTIASQPLSLRPEACRPAAGGAVHTRGLDFACDIYIWAPLAGTCGVLLLSLVITLYCKRGRKKLLYIFKQPFMRPVQTTQEEDGCSCRFPEEEEGGCELRVKFSRSADAPAYKQGQNQLYNELNLGRREEYDVLDKRRGRDPEMGGKPRRKNPQEGLYNELQKDKMAEAYSEIGMKGERRRGKGHDGLYQGLSTATKDTYDALHMQALPPR

SEQ ID NO: 113 - protein, 485 aa, Artificial Sequence
  source: /note="Description of Artificial Sequence: Synthetic polypeptide"
MALPVTALLLPLALLLHAARPEVQLVESGGGLVQPGGSLRLSCAVSGFALSNHGMSWVRRAPGKGLEWVSGIVYSGSTYYAASVKGRFTISRDNSRNTLYLQMNSLRPEDTAIYYCSAHGGESDVWGQGTTVTVSSASGGGGSGGRASGGGGSEIVLTQSPGTLSLSPGERATLSCRASQSIGSSSLAWYQQKPGQAPRLLMYGASSRASGIPDRFSGSGSGTDFTLTISRLEPEDFAVYYCQQYAGSPPFTFGQGTKVEIKTTTPAPRPPTPAPTIASQPLSLRPEACRPAAGGAVHTRGLDFACDIYIWAPLAGTCGVLLLSLVITLYCKRGRKKLLYIFKQPFMRPVQTTQEEDGCSCRFPEEEEGGCELRVKFSRSADAPAYKQGQNQLYNELNLGRREEYDVLDKRRGRDPEMGGKPRRKNPQEGLYNELQKDKMAEAYSEIGMKGERRRGKGHDGLYQGLSTATKDTYDALHMQALPPR

SEQ ID NO: 114 - DNA, 1470 bp, Artificial Sequence
  source: /note="Description of Artificial Sequence: Synthetic polynucleotide"
atggccctccctgtcaccgccctgctgcttccgctggctcttctgctccacgccgctcggccccaagtgcaactcgtggaatctggtggaggactcgtgcaacccggaagatcgcttagactgtcgtgtgccgccagcgggttcactttctcgaactacgcgatgtcctgggtccgccaggcacccggaaagggactcggttgggtgtccggcatttcccggtccggcgaaaatacctactacgccgactccgtgaagggccgcttcaccatctcaagggacaacagcaaaaacaccctgtacttgcaaatgaactccctgcgggatgaagatacagccgtgtactattgcgcccggtcgcctgcccattactacggcggaatggacgtctggggacagggaaccactgtgactgtcagcagcgcgtcgggtggcggcggctcagggggtcgggcctccggggggggagggtccgacatcgtgctgacccagtccccgggaaccctgagcctgagcccgggagagcgcgcgaccctgtcatgccgggcatcccagagcattagctcctcctttctcgcctggtatcagcagaagcccggacaggccccgaggctgctgatctacggcgctagcagaagggctaccggaatcccagaccggttctccggctccggttccgggaccgatttcacccttactatctcgcgcctggaacctgaggactccgccgtctactactgccagcagtaccactcatccccgtcgtggacgttcggacagggcaccaagctggagattaagaccactaccccagcaccgaggccacccaccccggctcctaccatcgcctcccagcctctgtccctgcgtccggaggcatgtagacccgcagctggtggggccgtgcatacccggggtcttgacttcgcctgcgatatctacatttgggcccctctggctggtacttgcggggtcctgctgctttcactcgtgatcactctttactgtaagcgcggtcggaagaagctgctgtacatctttaagcaacccttcatgaggcctgtgcagactactcaagaggaggacggctgttcatgccggttcccagaggaggaggaaggcggctgcgaactgcgcgtgaaattcagccgcagcgcagatgctccagcctacaagcaggggcagaaccagctctacaacgaactcaatcttggtcggagagaggagtacgacgtgctggacaagcggagaggacgggacccagaaatgggcgggaagccgcgcagaaagaatccccaagagggcctgtacaacgagctccaaaaggataagatggcagaagcctatagcgagattggtatgaaaggggaacgcagaagaggcaaaggccacgacggactgtaccagggactcagcaccgccaccaaggacacctatgacgctcttcacatgcaggccctgccgcctcgg

SEQ ID NO: 115 - DNA, 1464 bp, Artificial Sequence
  source: /note="Description of Artificial Sequence: Synthetic polynucleotide"
atggccctccctgtcaccgccctgctgcttccgctggctcttctgctccacgccgctcggccccaagtgcaactcgtcgaatccggtggaggtctggtccaacctggtagaagcctgagactgtcgtgtgcggccagcggattcacctttgatgactatgctatgcactgggtgcggcaggccccaggaaagggcctggaatgggtgtcgggaattagctggaactccgggtccattggctacgccgactccgtgaagggccgcttcaccatctcccgcgacaacgcaaagaactccctgtacttgcaaatgaactcgctcagggctgaggataccgcgctgtactactgctccgtgcattccttcctggcctactggggacagggaactctggtcaccgtgtcgagcgcctccggcggcgggggctcgggtggacgggcctcgggcggaggggggtccgacatcgtgatgacccagaccccgctgagcttgcccgtgactcccggagagcctgcatccatctcctgccggtcatcccagtcccttctccactccaacggatacaactacctcgactggtacctccagaagccgggacagagccctcagcttctgatctacctggggtcaaatagagcctcaggagtgccggatcggttcagcggatctggttcgggaactgatttcactctgaagatttcccgcgtggaagccgaggacgtgggcgtctactactgtatgcaggcgctgcagaccccctataccttcggccaagggacgaaagtggagatcaagaccactaccccagcaccgaggccacccaccccggctcctaccatcgcctcccagcctctgtccctgcgtccggaggcatgtagacccgcagctggtggggccgtgcatacccggggtcttgacttcgcctgcgatatctacatttgggcccctctggctggtacttgcggggtcctgctgctttcactcgtgatcactctttactgtaagcgcggtcggaagaagctgctgtacatctttaagcaacccttcatgaggcctgtgcagactactcaagaggaggacggctgttcatgccggttcccagaggaggaggaaggcggctgcgaactgcgcgtgaaattcagccgcagcgcagatgctccagcctacaagcaggggcagaaccagctctacaacgaactcaatcttggtcggagagaggagtacgacgtgctggacaagcggagaggacgggacccagaaatgggcgggaagccgcgcagaaagaatccccaagagggcctgtacaacgagctccaaaaggataagatggcagaagcctatagcgagattggtatgaaaggggaacgcagaagaggcaaaggccacgacggactgtaccagggactcagcaccgccaccaaggacacctatgacgctcttcacatgcaggccctgccgcctcgg

SEQ ID NO: 116 - DNA, 1461 bp, Artificial Sequence
  source: /note="Description of Artificial Sequence: Synthetic polynucleotide"
atggccctccctgtcaccgccctgctgcttccgctggctcttctgctccacgccgctcggcccgaagtgcaattgttggaatctggaggaggacttgtgcagcctggaggatcactgagactttcgtgtgcggtgtcaggcttcgccctgagcaaccacggcatgagctgggtgcggagagccccggggaagggtctggaatgggtgtccgggatcgtctactccggttcaacttactacgccgcaagcgtgaagggtcgcttcaccatttcccgcgataactcccggaacaccctgtacctccaaatgaactccctgcggcccgaggacaccgccatctactactgttccgcgcatggaggagagtccgatgtctggggacagggcactaccgtgaccgtgtcgagcgcctcggggggaggaggctccggcggtcgcgcctccggggggggtggcagcgacattgtgatgacgcagactccactctcgctgtccgtgaccccgggacagcccgcgtccatctcgtgcaagagctcccagagcctgctgaggaacgacggaaagactcctctgtattggtacctccagaaggctggacagcccccgcaactgctcatctacgaagtgtcaaatcgcttctccggggtgccggatcggttttccggctcgggatcgggcaccgacttcaccctgaaaatctccagggtcgaggccgaggacgtgggagcctactactgcatgcaaaacatccagttcccttccttcggcggcggcacaaagctggagattaagaccactaccccagcaccgaggccacccaccccggctcctaccatcgcctcccagcctctgtccctgcgtccggaggcatgtagacccgcagctggtggggccgtgcatacccggggtcttgacttcgcctgcgatatctacatttgggcccctctggctggtacttgcggggtcctgctgctttcactcgtgatcactctttactgtaagcgcggtcggaagaagctgctgtacatctttaagcaacccttcatgaggcctgtgcagactactcaagaggaggacggctgttcatgccggttcccagaggaggaggaaggcggctgcgaactgcgcgtgaaattcagccgcagcgcagatgctccagcctacaagcaggggcagaaccagctctacaacgaactcaatcttggtcggagagaggagtacgacgtgctggacaagcggagaggacgggacccagaaatgggcgggaagccgcgcagaaagaatccccaagagggcctgtacaacgagctccaaaaggataagatggcagaagcctatagcgagattggtatgaaaggggaacgcagaagaggcaaaggccacgacggactgtaccagggactcagcaccgccaccaaggacacctatgacgctcttcacatgcaggccctgccgcctcgg

SEQ ID NO: 117 - DNA, 1479 bp, Artificial Sequence
  source: /note="Description of Artificial Sequence: Synthetic polynucleotide"
atggccctccctgtcaccgccctgctgcttccgctggctcttctgctccacgccgctcggccccaagtccaactcgtccagtccggcgcagaagtcagaaaaaccggtgctagcgtgaaagtgtcctgcaaggcctccggctacattttcgataacttcggaatcaactgggtcagacaggccccgggccaggggctggaatggatgggatggatcaaccccaagaacaacaacaccaactacgcacagaagttccagggccgcgtgactatcaccgccgatgaatcgaccaataccgcctacatggaggtgtcctccctgcggtcggaggacactgccgtgtattactgcgcgaggggcccatactactaccaaagctacatggacgtctggggacagggaaccatggtgaccgtgtcatccgcctccggtggtggaggctccggggggcgggcttcaggaggcggaggaagcgatattgtgatgacccagactccgcttagcctgcccgtgactcctggagaaccggcctccatttcctgccggtcctcgcaatcactcctgcattccaacggttacaactacctgaattggtacctccagaagcctggccagtcgccccagttgctgatctatctgggctcgaagcgcgcctccggggtgcctgaccggtttagcggatctgggagcggcacggacttcactctccacatcacccgcgtgggagcggaggacgtgggagtgtactactgtatgcaggcgctgcagactccgtacacattcggacagggcaccaagctggagatcaagaccactaccccagcaccgaggccacccaccccggctcctaccatcgcctcccagcctctgtccctgcgtccggaggcatgtagacccgcagctggtggggccgtgcatacccggggtcttgacttcgcctgcgatatctacatttgggcccctctggctggtacttgcggggtcctgctgctttcactcgtgatcactctttactgtaagcgcggtcggaagaagctgctgtacatctttaagcaacccttcatgaggcctgtgcagactactcaagaggaggacggctgttcatgccggttcccagaggaggaggaaggcggctgcgaactgcgcgtgaaattcagccgcagcgcagatgctccagcctacaagcaggggcagaaccagctctacaacgaactcaatcttggtcggagagaggagtacgacgtgctggacaagcggagaggacgggacccagaaatgggcgggaagccgcgcagaaagaatccccaagagggcctgtacaacgagctccaaaaggataagatggcagaagcctatagcgagattggtatgaaaggggaacgcagaagaggcaaaggccacgacggactgtaccagggactcagcaccgccaccaaggacacctatgacgctcttcacatgcaggccctgccgcctcgg

SEQ ID NO: 118 - DNA, 1470 bp, Artificial Sequence
  source: /note="Description of Artificial Sequence: Synthetic polynucleotide"
atggccctccctgtcaccgccctgctgcttccgctggctcttctgctccacgccgctcggccccaagtgcaacttcaagaatcaggcggaggactcgtgcagcccggaggatcattgcggctctcgtgcgccgcctcgggcttcaccttctcgagcgacgccatgacctgggtccgccaggccccggggaaggggctggaatgggtgtctgtgatttccggctccgggggaactacgtactacgccgattccgtgaaaggtcgcttcactatctcccgggacaacagcaagaacaccctttatctgcaaatgaattccctccgcgccgaggacaccgccgtgtactactgcgccaagctggactcctcgggctactactatgcccggggtccgagatactggggacagggaaccctcgtgaccgtgtcctccgcgtccggcggaggagggtcgggagggcgggcctccggcggcggcggttcggacatccagctgacccagtccccatcctcactgagcgcaagcgtgggcgacagagtcaccattacatgcagggcgtcccagagcatcagctcctacctgaactggtaccaacagaagcctggaaaggctcctaagctgttgatctacggggcttcgaccctggcatccggggtgcccgcgaggtttagcggaagcggtagcggcactcacttcactctgaccattaacagcctccagtccgaggattcagccacttactactgtcagcagtcctacaagcgggccagcttcggacagggcactaaggtcgagatcaagaccactaccccagcaccgaggccacccaccccggctcctaccatcgcctcccagcctctgtccctgcgtccggaggcatgtagacccgcagctggtggggccgtgcatacccggggtcttgacttcgcctgcgatatctacatttgggcccctctggctggtacttgcggggtcctgctgctttcactcgtgatcactctttactgtaagcgcggtcggaagaagctgctgtacatctttaagcaacccttcatgaggcctgtgcagactactcaagaggaggacggctgttcatgccggttcccagaggaggaggaaggcggctgcgaactgcgcgtgaaattcagccgcagcgcagatgctccagcctacaagcaggggcagaaccagctctacaacgaactcaatcttggtcggagagaggagtacgacgtgctggacaagcggagaggacgggacccagaaatgggcgggaagccgcgcagaaagaatccccaagagggcctgtacaacgagctccaaaaggataagatggcagaagcctatagcgagattggtatgaaaggggaacgcagaagaggcaaaggccacgacggactgtaccagggactcagcaccgccaccaaggacacctatgacgctcttcacatgcaggccctgccgcctcgg

SEQ ID NO: 119 - DNA, 1473 bp, Artificial Sequence
  source: /note="Description of Artificial Sequence: Synthetic polynucleotide"
atggccctccctgtcaccgccctgctgcttccgctggctcttctgctccacgccgctcggccccaagtccaactggtccagagcggtgcagaagtgaagaagcccggagcgagcgtgaaagtgtcctgcaaggcttccgggtacaccttctccaactacggcatcacttgggtgcgccaggccccgggacagggcctggaatggatggggtggatttccgcgtacaacggcaatacgaactacgctcagaagttccagggtagagtgaccatgactaggaacacctccatttccaccgcctacatggaactgtcctccctgcggagcgaggacaccgccgtgtactattgcgcccggggaccatactactactacatggatgtctgggggaaggggactatggtcaccgtgtcatccgcctcgggaggcggcggatcaggaggacgcgcctctggtggtggaggatcggagatcgtgatgacccagagccctctctccttgcccgtgactcctggggagcccgcatccatttcatgccggagctcccagtcacttctctactccaacggctataactacgtggattggtacctccaaaagccgggccagagcccgcagctgctgatctacctgggctcgaacagggccagcggagtgcctgaccggttctccgggtcgggaagcgggaccgacttcaagctgcaaatctcgagagtggaggccgaggacgtgggaatctactactgtatgcagggccgccagtttccgtactcgttcggacagggcaccaaagtggaaatcaagaccactaccccagcaccgaggccacccaccccggctcctaccatcgcctcccagcctctgtccctgcgtccggaggcatgtagacccgcagctggtggggccgtgcatacccggggtcttgacttcgcctgcgatatctacatttgggcccctctggctggtacttgcggggtcctgctgctttcactcgtgatcactctttactgtaagcgcggtcggaagaagctgctgtacatctttaagcaacccttcatgaggcctgtgcagactactcaagaggaggacggctgttcatgccggttcccagaggaggaggaaggcggctgcgaactgcgcgtgaaattcagccgcagcgcagatgctccagcctacaagcaggggcagaaccagctctacaacgaactcaatcttggtcggagagaggagtacgacgtgctggacaagcggagaggacgggacccagaaatgggcgggaagccgcgcagaaagaatccccaagagggcctgtacaacgagctccaaaaggataagatggcagaagcctatagcgagattggtatgaaaggggaacgcagaagaggcaaaggccacgacggactgtaccagggactcagcaccgccaccaaggacacctatgacgctcttcacatgcaggccctgccgcctcgg

SEQ ID NO: 120 - DNA, 1446 bp, Artificial Sequence
  source: /note="Description of Artificial Sequence: Synthetic polynucleotide"
atggccctccctgtcaccgccctgctgcttccgctggctcttctgctccacgccgctcggcccgaagtgcaattgctcgaaactggaggaggtctggtgcaacctggaggatcacttcgcctgtcctgcgccgtgtcgggctttgccctgtccaaccatggaatgagctgggtccgccgcgcgccggggaagggcctcgaatgggtgtccggcatcgtctactccggctccacctactacgccgcgtccgtgaagggccggttcacgatttcacgggacaactcgcggaacaccctgtacctccaaatgaattcccttcggccggaggatactgccatctactactgctccgcccacggtggcgaatccgacgtctggggccagggaaccaccgtgaccgtgtccagcgcgtccgggggaggaggaagcgggggtagagcatcgggtggaggcggatcagagatcgtgctgacccagtcccccgccaccttgagcgtgtcaccaggagagtccgccaccctgtcatgccgcgccagccagtccgtgtcctccaacctggcttggtaccagcagaagccggggcaggcccctagactcctgatctatggggcgtcgacccgggcatctggaattcccgataggttcagcggatcgggctcgggcactgacttcactctgaccatctcctcgctgcaagccgaggacgtggctgtgtactactgtcagcagtacggaagctccctgactttcggtggcgggaccaaagtcgagattaagaccactaccccagcaccgaggccacccaccccggctcctaccatcgcctcccagcctctgtccctgcgtccggaggcatgtagacccgcagctggtggggccgtgcatacccggggtcttgacttcgcctgcgatatctacatttgggcccctctggctggtacttgcggggtcctgctgctttcactcgtgatcactctttactgtaagcgcggtcggaagaagctgctgtacatctttaagcaacccttcatgaggcctgtgcagactactcaagaggaggacggctgttcatgccggttcccagaggaggaggaaggcggctgcgaactgcgcgtgaaattcagccgcagcgcagatgctccagcctacaagcaggggcagaaccagctctacaacgaactcaatcttggtcggagagaggagtacgacgtgctggacaagcggagaggacgggacccagaaatgggcgggaagccgcgcagaaagaatccccaagagggcctgtacaacgagctccaaaaggataagatggcagaagcctatagcgagattggtatgaaaggggaacgcagaagaggcaaaggccacgacggactgtaccagggactcagcaccgccaccaaggacacctatgacgctcttcacatgcaggccctgccgcctcgg

SEQ ID NO: 121 - DNA, 1449 bp, Artificial Sequence
  source: /note="Description of Artificial Sequence: Synthetic polynucleotide"
atggccctccctgtcaccgccctgctgcttccgctggctcttctgctccacgccgctcggcccgaagtgcaattggtggaaactggaggaggacttgtgcaacctggaggatcattgagactgagctgcgcagtgtcgggattcgccctgagcaaccatggaatgtcctgggtcagaagggcccctggaaaaggcctcgaatgggtgtcagggatcgtgtactccggttccacttactacgccgcctccgtgaaggggcgcttcactatctcacgggataactcccgcaataccctgtacctccaaatgaacagcctgcggccggaggataccgccatctactactgttccgcccacggtggagagtctgacgtctggggccagggaactaccgtgaccgtgtcctccgcgtccggcggtggagggagcggcggccgcgccagcggcggcggaggctccgagatcgtgatgacccagagccccgctactctgtcggtgtcgcccggagaaagggcgaccctgtcctgccgggcgtcgcagtccgtgagcagcaagctggcttggtaccagcagaagccgggccaggcaccacgcctgcttatgtacggtgcctccattcgggccaccggaatcccggaccggttctcggggtcggggtccggtaccgagttcacactgaccatttcctcgctcgagcccgaggactttgccgtctattactgccagcagtacggctcctcctcatggacgttcggccaggggaccaaggtcgaaatcaagaccactaccccagcaccgaggccacccaccccggctcctaccatcgcctcccagcctctgtccctgcgtccggaggcatgtagacccgcagctggtggggccgtgcatacccggggtcttgacttcgcctgcgatatctacatttgggcccctctggctggtacttgcggggtcctgctgctttcactcgtgatcactctttactgtaagcgcggtcggaagaagctgctgtacatctttaagcaacccttcatgaggcctgtgcagactactcaagaggaggacggctgttcatgccggttcccagaggaggaggaaggcggctgcgaactgcgcgtgaaattcagccgcagcgcagatgctccagcctacaagcaggggcagaaccagctctacaacgaactcaatcttggtcggagagaggagtacgacgtgctggacaagcggagaggacgggacccagaaatgggcgggaagccgcgcagaaagaatccccaagagggcctgtacaacgagctccaaaaggataagatggcagaagcctatagcgagattggtatgaaaggggaacgcagaagaggcaaaggccacgacggactgtaccagggactcagcaccgccaccaaggacacctatgacgctcttcacatgcaggccctgccgcctcgg

SEQ ID NO: 122 - DNA, 1455 bp, Artificial Sequence
  source: /note="Description of Artificial Sequence: Synthetic polynucleotide"
atggccctccctgtcaccgccctgctgcttccgctggctcttctgctccacgccgctcggcccgaagtgcaattggtggagactggaggaggagtggtgcaacctggaggaagcctgagactgtcatgcgcggtgtcgggcttcgccctctccaaccacggaatgtcctgggtccgccgggcccctgggaaaggacttgaatgggtgtccggcatcgtgtactcgggttccacctactacgcggcctcagtgaagggccggtttactattagccgcgacaactccagaaacacactgtacctccaaatgaactcgctgcggccggaagataccgctatctactactgctccgcccatgggggagagtcggacgtctggggacagggcaccactgtcactgtgtccagcgcttccggcggtggtggaagcgggggacgggcctcaggaggcggtggcagcgagattgtgctgacccagtcccccgggaccctgagcctgtccccgggagaaagggccaccctctcctgtcgggcatcccagtccgtggggtctactaaccttgcatggtaccagcagaagcccggccaggcccctcgcctgctgatctacgacgcgtccaatagagccaccggcatcccggatcgcttcagcggaggcggatcgggcaccgacttcaccctcaccatttcaaggctggaaccggaggacttcgccgtgtactactgccagcagtatggttcgtccccaccctggacgttcggccaggggactaaggtcgagatcaagaccactaccccagcaccgaggccacccaccccggctcctaccatcgcctcccagcctctgtccctgcgtccggaggcatgtagacccgcagctggtggggccgtgcatacccggggtcttgacttcgcctgcgatatctacatttgggcccctctggctggtacttgcggggtcctgctgctttcactcgtgatcactctttactgtaagcgcggtcggaagaagctgctgtacatctttaagcaacccttcatgaggcctgtgcagactactcaagaggaggacggctgttcatgccggttcccagaggaggaggaaggcggctgcgaactgcgcgtgaaattcagccgcagcgcagatgctccagcctacaagcaggggcagaaccagctctacaacgaactcaatcttggtcggagagaggagtacgacgtgctggacaagcggagaggacgggacccagaaatgggcgggaagccgcgcagaaagaatccccaagagggcctgtacaacgagctccaaaaggataagatggcagaagcctatagcgagattggtatgaaaggggaacgcagaagaggcaaaggccacgacggactgtaccagggactcagcaccgccaccaaggacacctatgacgctcttcacatgcaggccctgccgcctcgg

SEQ ID NO: 123 - DNA, 1449 bp, Artificial Sequence
  source: /note="Description of Artificial Sequence: Synthetic polynucleotide"
atggccctccctgtcaccgccctgctgcttccgctggctcttctgctccacgccgctcggccccaagtgcaactcgtggaatctggtggaggactcgtgaaacctggaggatcattgagactgtcatgcgcggcctcgggattcacgttctccgattactacatgagctggattcgccaggctccggggaagggactggaatgggtgtcctacatttcctcatccggctccaccatctactacgcggactccgtgaaggggagattcaccattagccgcgataacgccaagaacagcctgtaccttcagatgaactccctgcgggctgaagatactgccgtctactactgcgcaagggagagcggagatgggatggacgtctggggacagggtaccactgtgaccgtgtcgtcggcctccggcggagggggttcgggtggaagggccagcggcggcggaggcagcgacatccagatgacccagtccccctcatcgctgtccgcctccgtgggcgaccgcgtcaccatcacatgccgggcctcacagtcgatctcctcctacctcaattggtatcagcagaagcccggaaaggcccctaagcttctgatctacgcagcgtcctccctgcaatccggggtcccatctcggttctccggctcgggcagcggtaccgacttcactctgaccatctcgagcctgcagccggaggacttcgccacttactactgtcagcaaagctacaccctcgcgtttggccagggcaccaaagtggacatcaagaccactaccccagcaccgaggccacccaccccggctcctaccatcgcctcccagcctctgtccctgcgtccggaggcatgtagacccgcagctggtggggccgtgcatacccggggtcttgacttcgcctgcgatatctacatttgggcccctctggctggtacttgcggggtcctgctgctttcactcgtgatcactctttactgtaagcgcggtcggaagaagctgctgtacatctttaagcaacccttcatgaggcctgtgcagactactcaagaggaggacggctgttcatgccggttcccagaggaggaggaaggcggctgcgaactgcgcgtgaaattcagccgcagcgcagatgctccagcctacaagcaggggcagaaccagctctacaacgaactcaatcttggtcggagagaggagtacgacgtgctggacaagcggagaggacgggacccagaaatgggcgggaagccgcgcagaaagaatccccaagagggcctgtacaacgagctccaaaaggataagatggcagaagcctatagcgagattggtatgaaaggggaacgcagaagaggcaaaggccacgacggactgtaccagggactcagcaccgccaccaaggacacctatgacgctcttcacatgcaggccctgccgcctcgg

SEQ ID NO: 124 - DNA, 1449 bp, Artificial Sequence
  source: /note="Description of Artificial Sequence: Synthetic polynucleotide"
atggccctccctgtcaccgccctgctgcttccgctggctcttctgctccacgccgctcggcccgaagtgcaattggtggaatcagggggaggacttgtgcagcctggaggatcgctgagactgtcatgtgccgtgtccggctttgccctgtccaaccacgggatgtcctgggtccgccgcgcgcctggaaagggcctcgaatgggtgtcgggtattgtgtacagcggtagcacctactatgccgcatccgtgaaggggagattcaccatcagccgggacaactccaggaacactctgtacctccaaatgaattcgctgaggccagaggacactgccatctactactgctccgcgcatggcggagagtccgacgtctggggacaggggaccaccgtgaccgtgtctagcgcgtccggcggaggcggcagcgggggtcgggcatcagggggcggcggatcggacatccagctcacccagtccccgagctcgctgtccgcctccgtgggagatcgggtcaccatcacgtgccgcgccagccagtcgatttcctcctacctgaactggtaccaacagaagcccggaaaagccccgaagcttctcatctacgccgcctcgagcctgcagtcaggagtgccctcacggttctccggctccggttccggtactgatttcaccctgaccatttcctccctgcaaccggaggacttcgctacttactactgccagcagtcgtactccaccccctacactttcggacaaggcaccaaggtcgaaatcaagaccactaccccagcaccgaggccacccaccccggctcctaccatcgcctcccagcctctgtccctgcgtccggaggcatgtagacccgcagctggtggggccgtgcatacccggggtcttgacttcgcctgcgatatctacatttgggcccctctggctggtacttgcggggtcctgctgctttcactcgtgatcactctttactgtaagcgcggtcggaagaagctgctgtacatctttaagcaacccttcatgaggcctgtgcagactactcaagaggaggacggctgttcatgccggttcccagaggaggaggaaggcggctgcgaactgcgcgtgaaattcagccgcagcgcagatgctccagcctacaagcaggggcagaaccagctctacaacgaactcaatcttggtcggagagaggagtacgacgtgctggacaagcggagaggacgggacccagaaatgggcgggaagccgcgcagaaagaatccccaagagggcctgtacaacgagctccaaaaggataagatggcagaagcctatagcgagattggtatgaaaggggaacgcagaagaggcaaaggccacgacggactgtaccagggactcagcaccgccaccaaggacacctatgacgctcttcacatgcaggccctgccgcctcgg

SEQ ID NO: 125 - DNA, 1470 bp, Artificial Sequence
  source: /note="Description of Artificial Sequence: Synthetic polynucleotide"
atggccctccctgtcaccgccctgctgcttccgctggctcttctgctccacgccgctcggccccaagtgcaactggtgcaaagcggaggaggattggtcaaacccggaggaagcctgagactgtcatgcgcggcctctggattcaccttctccgattactacatgtcatggatcagacaggccccggggaagggcctcgaatgggtgtcctacatctcgtcctccgggaacaccatctactacgccgacagcgtgaagggccgctttaccatttcccgcgacaacgcaaagaactcgctgtaccttcagatgaattccctgcgggctgaagataccgcggtgtactattgcgcccggtccactatggtccgggaggactactggggacagggcacactcgtgaccgtgtccagcgcgagcgggggtggaggcagcggtggacgcgcctccggcggcggcggttcagacatcgtgctgactcagtcgcccctgtcgctgccggtcaccctgggccaaccggcctcaattagctgcaagtcctcggagagcctggtgcacaactcaggaaagacttacctgaactggttccatcagcggcctggacagtccccacggaggctcatctatgaagtgtccaacagggattcgggggtgcccgaccgcttcactggctccgggtccggcaccgacttcaccttgaaaatctccagagtggaagccgaggacgtgggcgtgtactactgtatgcagggtacccactggcctggaacctttggacaaggaactaagctcgagattaagaccactaccccagcaccgaggccacccaccccggctcctaccatcgcctcccagcctctgtccctgcgtccggaggcatgtagacccgcagctggtggggccgtgcatacccggggtcttgacttcgcctgcgatatctacatttgggcccctctggctggtacttgcggggtcctgctgctttcactcgtgatcactctttactgtaagcgcggtcggaagaagctgctgtacatctttaagcaacccttcatgaggcctgtgcagactactcaagaggaggacggctgttcatgccggttcccagaggaggaggaaggcggctgcgaactgcgcgtgaaattcagccgcagcgcagatgctccagcctacaagcaggggcagaaccagctctacaacgaactcaatcttggtcggagagaggagtacgacgtgctggacaagcggagaggacgggacccagaaatgggcgggaagccgcgcagaaagaatccccaagagggcctgtacaacgagctccaaaaggataagatggcagaagcctatagcgagattggtatgaaaggggaacgcagaagaggcaaaggccacgacggactgtaccagggactcagcaccgccaccaaggacacctatgacgctcttcacatgcaggccctgccgcctcgg

SEQ ID NO: 126 - DNA, 1449 bp, Artificial Sequence
  source: /note="Description of Artificial Sequence: Synthetic polynucleotide"
atggccctccctgtcaccgccctgctgcttccgctggctcttctgctccacgccgctcggccccaagtgcaactcgtggaatctggtggaggactcgtgcaacccggtggaagccttaggctgtcgtgcgccgtcagcgggtttgctctgagcaaccatggaatgtcctgggtccgccgggcaccgggaaaagggctggaatgggtgtccggcatcgtgtacagcgggtcaacctattacgccgcgtccgtgaagggcagattcactatctcaagagacaacagccggaacaccctgtacttgcaaatgaattccctgcgccccgaggacaccgccatctactactgctccgcccacggaggagagtcggacgtgtggggccagggaacgactgtgactgtgtccagcgcatcaggagggggtggttcgggcggccgggcctcggggggaggaggttccgacattcggctgacccagtccccgtccccactgtcggcctccgtcggcgaccgcgtgaccatcacttgtcaggcgtccgaggacattaacaagttcctgaactggtaccaccagacccctggaaaggcccccaagctgctgatctacgatgcctcgacccttcaaactggagtgcctagccggttctccgggtccggctccggcactgatttcactctgaccatcaactcattgcagccggaagatatcgggacctactattgccagcagtacgaatccctcccgctcacattcggcgggggaaccaaggtcgagattaagaccactaccccagcaccgaggccacccaccccggctcctaccatcgcctcccagcctctgtccctgcgtccggaggcatgtagacccgcagctggtggggccgtgcatacccggggtcttgacttcgcctgcgatatctacatttgggcccctctggctggtacttgcggggtcctgctgctttcactcgtgatcactctttactgtaagcgcggtcggaagaagctgctgtacatctttaagcaacccttcatgaggcctgtgcagactactcaagaggaggacggctgttcatgccggttcccagaggaggaggaaggcggctgcgaactgcgcgtgaaattcagccgcagcgcagatgctccagcctacaagcaggggcagaaccagctctacaacgaactcaatcttggtcggagagaggagtacgacgtgctggacaagcggagaggacgggacccagaaatgggcgggaagccgcgcagaaagaatccccaagagggcctgtacaacgagctccaaaaggataagatggcagaagcctatagcgagattggtatgaaaggggaacgcagaagaggcaaaggccacgacggactgtaccagggactcagcaccgccaccaaggacacctatgacgctcttcacatgcaggccctgccgcctcgg

SEQ ID NO: 127 - DNA, 1452 bp, Artificial Sequence
  source: /note="Description of Artificial Sequence: Synthetic polynucleotide"
atggccctccctgtcaccgccctgctgcttccgctggctcttctgctccacgccgctcggcccgaagtgcaattggtggaaactggaggaggacttgtgcaacctggaggatcattgcggctctcatgcgctgtctccggcttcgccctgtcaaatcacgggatgtcgtgggtcagacgggccccgggaaagggtctggaatgggtgtcggggattgtgtacagcggctccacctactacgccgcttcggtcaagggccgcttcactatttcacgggacaacagccgcaacaccctctatctgcaaatgaactctctccgcccggaggataccgccatctactactgctccgcacacggcggcgaatccgacgtgtggggacagggaaccactgtcaccgtgtcgtccgcatccggtggcggaggatcgggtggccgggcctccgggggcggcggcagcgagactaccctgacccagtcccctgccactctgtccgtgagcccgggagagagagccacccttagctgccgggccagccagagcgtgggctccaacctggcctggtaccagcagaagccaggacagggtcccaggctgctgatctacggagcctccactcgcgcgaccggcatccccgcgaggttctccgggtcgggttccgggaccgagttcaccctgaccatctcctccctccaaccggaggacttcgcggtgtactactgtcagcagtacaacgattggctgcccgtgacatttggacaggggacgaaggtggaaatcaaaaccactaccccagcaccgaggccacccaccccggctcctaccatcgcctcccagcctctgtccctgcgtccggaggcatgtagacccgcagctggtggggccgtgcatacccggggtcttgacttcgcctgcgatatctacatttgggcccctctggctggtacttgcggggtcctgctgctttcactcgtgatcactctttactgtaagcgcggtcggaagaagctgctgtacatctttaagcaacccttcatgaggcctgtgcagactactcaagaggaggacggctgttcatgccggttcccagaggaggaggaaggcggctgcgaactgcgcgtgaaattcagccgcagcgcagatgctccagcctacaagcaggggcagaaccagctctacaacgaactcaatcttggtcggagagaggagtacgacgtgctggacaagcggagaggacgggacccagaaatgggcgggaagccgcgcagaaagaatccccaagagggcctgtacaacgagctccaaaaggataagatggcagaagcctatagcgagattggtatgaaaggggaacgcagaagaggcaaaggccacgacggactgtaccagggactcagcaccgccaccaaggacacctatgacgctcttcacatgcaggccctgccgcctcgg

SEQ ID NO: 128 - DNA, 1455 bp, Artificial Sequence
  source: /note="Description of Artificial Sequence: Synthetic polynucleotide"
atggccctccctgtcaccgccctgctgcttccgctggctcttctgctccacgccgctcggcccgaagtgcaattggtggaatctggtggaggacttgtgcaacctggaggatcactgagactgtcatgcgcggtgtccggttttgccctgagcaatcatgggatgtcgtgggtccggcgcgcccccggaaagggtctggaatgggtgtcgggtatcgtctactccgggagcacttactacgccgcgagcgtgaagggccgcttcaccatttcccgcgataactcccgcaacaccctgtacttgcaaatgaactcgctccggcctgaggacactgccatctactactgctccgcacacggaggagaatccgacgtgtggggccagggaactaccgtgaccgtcagcagcgcctccggcggcgggggctcaggcggacgggctagcggcggcggtggctccgagatcgtgctgacccagtcgcctggcactctctcgctgagccccggggaaagggcaaccctgtcctgtcgggccagccagtccattggatcatcctccctcgcctggtatcagcagaaaccgggacaggctccgcggctgcttatgtatggggccagctcaagagcctccggcattcccgaccggttctccgggtccggttccggcaccgatttcaccctgactatctcgaggctggagccagaggacttcgccgtgtactactgccagcagtacgcggggtccccgccgttcacgttcggacagggaaccaaggtcgagatcaagaccactaccccagcaccgaggccacccaccccggctcctaccatcgcctcccagcctctgtccctgcgtccggaggcatgtagacccgcagctggtggggccgtgcatacccggggtcttgacttcgcctgcgatatctacatttgggcccctctggctggtacttgcggggtcctgctgctttcactcgtgatcactctttactgtaagcgcggtcggaagaagctgctgtacatctttaagcaacccttcatgaggcctgtgcagactactcaagaggaggacggctgttcatgccggttcccagaggaggaggaaggcggctgcgaactgcgcgtgaaattcagccgcagcgcagatgctccagcctacaagcaggggcagaaccagctctacaacgaactcaatcttggtcggagagaggagtacgacgtgctggacaagcggagaggacgggacccagaaatgggcgggaagccgcgcagaaagaatccccaagagggcctgtacaacgagctccaaaaggataagatggcagaagcctatagcgagattggtatgaaaggggaacgcagaagaggcaaaggccacgacggactgtaccagggactcagcaccgccaccaaggacacctatgacgctcttcacatgcaggccctgccgcctcgg

SEQ ID NO: 129 - protein, 243 aa, Artificial Sequence
  source: /note="Description of Artificial Sequence: Synthetic polypeptide"
QVQLQESGPGLVKPSETLSLTCTVSGGSISSSYYYWGWIRQPPGKGLEWIGSIYYSGSAYYNPSLKSRVTISVDTSKNQFSLRLSSVTAADTAVYYCARHWQEWPDAFDIWGQGTMVTVSSGGGGSGGGGSGGGGSETTLTQSPAFMSATPGDKVIISCKASQDIDDAMNWYQQKPGEAPLFIIQSATSPVPGIPPRFSGSGFGTDFSLTINNIESEDAAYYFCLQHDNFPLTFGQGTKLEIK

SEQ ID NO: 130 - protein, 244 aa, Artificial Sequence
  source: /note="Description of Artificial Sequence: Synthetic polypeptide"
VNLRESGPALVKPTQTLTLTCTFSGFSLRTSGMCVSWIRQPPGKALEWLARIDWDEDKFYSTSLKTRLTISKDTSDNQVVLRMTNMDPADTATYYCARSGAGGTSATAFDIWGPGTMVTVSSGGGGSGGGGSGGGGSDIQMTQSPSSLSASVGDRVTITCRASQDIYNNLAWFQLKPGSAPRSLMYAANKSQSGVPSRFSGSASGTDFTLTISSLQPEDFATYYCQHYYRFPYSFGQGTKLEIK

SEQ ID NO: 131 - protein, 246 aa, Artificial Sequence
  source: /note="Description of Artificial Sequence: Synthetic polypeptide"
EVQLVESGGGLVKPGGSLRLSCAASGFTFSSYSMNWVRQAPGKGLEWVSSISSSSSYIYYADSVKGRFTISRDNAKNSLYLQMNSLRAEDTAVYYCAKTIAAVYAFDIWGQGTTVTVSSGGGGSGGGGSGGGGSEIVLTQSPLSLPVTPEEPASISCRSSQSLLHSNGYNYLDWYLQKPGQSPQLLIYLGSNRASGVPDRFSGSGSGTDFTLKISRVEAEDVGVYYCMQALQTPYTFGQGTKLEIK

SEQ ID NO: 132 - protein, 240 aa, Artificial Sequence
  source: /note="Description of Artificial Sequence: Synthetic polypeptide"
EVQLVESGGGLVKPGGSLRLSCAASGFTFSDYYMSWIRQAPGKGLEWVSYISSSGSTIYYADSVKGRFTISRDNAKNSLYLQMNSLRAEDTAVYYCARDLRGAFDIWGQGTMVTVSSGGGGSGGGGSGGGGSSYVLTQSPSVSAAPGYTATISCGGNNIGTKSVHWYQQKPGQAPLLVIRDDSVRPSKIPGRFSGSNSGNMATLTISGVQAGDEADFYCQVWDSDSEHVVFGGGTKLTVL

SEQ ID NO: 133 - protein, 241 aa, Artificial Sequence
  source: /note="Description of Artificial Sequence: Synthetic polypeptide"
QVQLVQSGAEVKKPGASVKVSCKPSGYTVTSHYIHWVRRAPGQGLEWMGMINPSGGVTAYSQTLQGRVTMTSDTSSSTVYMELSSLRSEDTAMYYCAREGSGSGWYFDFWGRGTLVTVSSGGGGSGGGGSGGGGSSYVLTQPPSVSVSPGQTASITCSGDGLSKKYVSWYQQKAGQSPVVLISRDKERPSGIPDRFSGSNSADTATLTISGTQAMDEADYYCQAWDDTTVVFGGGTKLTVL

SEQ ID NO: 134 - protein, 245 aa, Artificial Sequence
  source: /note="Description of Artificial Sequence: Synthetic polypeptide"
QVQLQESGPGLVKPSQTLSLTCTVSGGSISSGGYYWSWIRQHPGKGLEWIGYIYYSGSTYYNPSLKSRVTISVDTSKNQFSLKLSSVTAADTAVYYCARAGIAARLRGAFDIWGQGTMVTVSSGGGGSGGGGSGGGGSDIVMTQSPSSVSASVGDRVIITCRASQGIRNWLAWYQQKPGKAPNLLIYAASNLQSGVPSRFSGSGSGADFTLTISSLQPEDVATYYCQKYNSAPFTFGPGTKVDIK

SEQ ID NO: 135 - protein, 253 aa, Artificial Sequence
  source: /note="Description of Artificial Sequence: Synthetic polypeptide"
QVQLVQSGAEVKKPGSSVKVSCKASGGTFSSYAISWVRQAPGQGLEWMGGIIPIFGTANYAQKFQGRVTITADESTSTAYMELSSLRSEDTAVYYCARRGGYQLLRWDVGLLRSAFDIWGQGTMVTVSSGGGGSGGGGSGGGGSSYVLTQPPSVSVAPGQTARITCGGNNIGSKSVHWYQQKPGQAPVLVLYGKNNRPSGVPDRFSGSRSGTTASLTITGAQAEDEADYYCSSRDSSGDHLRVFGTGTKVTVL

SEQ ID NO: 136 - protein, 248 aa, Artificial Sequence
  source: /note="Description of Artificial Sequence: Synthetic polypeptide"
EVQLQQSGPGLVKPSQTLSLTCAISGDSVSSNSAAWNWIRQSPSRGLEWLGRTYYRSKWYSFYAISLKSRIIINPDTSKNQFSLQLKSVTPEDTAVYYCARSSPEGLFLYWFDPWGQGTLVTVSSGGDGSGGGGSGGGGSSSELTQDPAVSVALGQTIRITCQGDSLGNYYATWYQQKPGQAPVLVIYGTNNRPSGIPDRFSASSSGNTASLTITGAQAEDEADYYCNSRDSSGHHLLFGTGTKVTVL

SEQ ID NO: 137 - protein, 246 aa, Artificial Sequence
  source: /note="Description of Artificial Sequence: Synthetic polypeptide"
EVQLVESGGGLVQPGGSLRLSCAASGFTFSSYAMSWVRQAPGKGLEWVSAISGSGGSTYYADSVKGRFTISRDNSKNTLYLQMNSLRAEDTAVYYCAKVEGSGSLDYWGQGTLVTVSSGGGGSGGGGSGGGGSEIVMTQSPGTLSLSPGERATLSCRASQSVSSAYLAWYQQKPGQPPRLLISGASTRATGIPDRFGGSGSGTDFTLTISRLEPEDFAVYYCQHYGSSFNGSSLFTFGQGTRLEIK

SEQ ID NO: 138 - protein, 241 aa, Artificial Sequence
  source: /note="Description of Artificial Sequence: Synthetic polypeptide"
EVQLVETGGGLVQPGGSLRLSCAASGITFSRYPMSWVRQAPGKGLEWVSGISDSGVSTYYADSAKGRFTISRDNSKNTLFLQMSSLRDEDTAVYYCVTRAGSEASDIWGQGTMVTVSSGGGGSGGGGSGGGGSEIVLTQSPATLSLSPGERATLSCRASQSVSNSLAWYQQKPGQAPRLLIYDASSRATGIPDRFSGSGSGTDFTLTISRLEPEDFAIYYCQQFGTSSGLTFGGGTKLEIK

SEQ ID NO: 139 - protein, 248 aa, Artificial Sequence
  source: /note="Description of Artificial Sequence: Synthetic polypeptide"
QVQLVESGGGLVQPGGSLRLSCAASGFTFSSYAMSWVRQAPGKGLEWVSAISGSGGSTYYADSVKGRFTISRDNAKNSLYLQMNSLRAEDTAIYYCARATYKRELRYYYGMDVWGQGTMVTVSSGGGGSGGGGSGGGGSEIVMTQSPGTVSLSPGERATLSCRASQSVSSSFLAWYQQKPGQAPRLLIYGASSRATGIPDRFSGSGSGTDFTLTISRLEPEDSAVYYCQQYHSSPSWTFGQGTRLEIK

SEQ ID NO: 140 - protein, 248 aa, Artificial Sequence
  source: /note="Description of Artificial Sequence: Synthetic polypeptide"
EVQLVETGGGLVQPGGSLRLSCAASGFTFSSYAMSWVRQAPGKGLEWVSAISGSGGSTYYADSVKGRFTISRDNSKNTLYLQMNTLKAEDTAVYYCARATYKRELRYYYGMDVWGQGTTVTVSSGGGGSGGGGSGGGGSEIVLTQSPSTLSLSPGESATLSCRASQSVSTTFLAWYQQKPGQAPRLLIYGSSNRATGIPDRFSGSGSGTDFTLTIRRLEPEDFAVYYCQQYHSSPSWTFGQGTKVEIK

SEQ ID NO: 141 - protein, 239 aa, Artificial Sequence
  source: /note="Description of Artificial Sequence: Synthetic polypeptide"
EVQLVETGGGLVQPGRSLRLSCAASGFTFDDYAMHWVRQAPGKGLEWVSGISWNSGSIGYADSVKGRFTISRDNAKNSLYLQMNSLRDEDTAVYYCARVGKAVPDVWGQGTTVTVSSGGGGSGGGGSGGGGSDIVMTQTPSSLSASVGDRVTITCRASQSISSYLNWYQQKPGKAPKLLIYAASSLQSGVPSRFSGSGSGTDFTLTISSLQPEDFATYYCQQSYSTPYSFGQGTRLEIK

SEQ ID NO: 142 - protein, 246 aa, Artificial Sequence
  source: /note="Description of Artificial Sequence: Synthetic polypeptide"
EVQLVESGGGLVQPGRSLRLSCTASGFTFDDYAMHWVRQRPGKGLEWVASINWKGNSLAYGDSVKGRFAISRDNAKNTVFLQMNSLRTEDTAVYYCASHQGVAYYNYAMDVWGRGTLVTVSSGGGGSGGGGSGGGGSEIVLTQSPGTLSLSPGERATLSCRATQSIGSSFLAWYQQRPGQAPRLLIYGASQRATGIPDRFSGRGSGTDFTLTISRVEPEDSAVYYCQHYESSPSWTFGQGTKVEIK

SEQ ID NO: 143 - protein, 241 aa, Artificial Sequence
  source: /note="Description of Artificial Sequence: Synthetic polypeptide"
EVQLVESGGGLVQPGGSLRLSCAASGFTFSSYAMSWVRQAPGKGLEWVSAISGSGGSTYYADSVKGRFTISRDNSKNTLYLQMNSLRAEDTAVYYCAKVVRDGMDVWGQGTTVTVSSGGGGSGGGGSGGGGSEIVLTQSPATLSLSPGERATLSCRASQSVSSSYLAWYQQKPGQAPRLLIYGASSRATGIPDRFSGNGSGTDFTLTISRLEPEDFAVYYCQQYGSPPRFTFGPGTKVDIK

SEQ ID NO: 144 - protein, 242 aa, Artificial Sequence
  source: /note="Description of Artificial Sequence: Synthetic polypeptide"
EVQLLESGGGLVQPGGSLRLSCAASGFTFSSYAMSWVRQAPGKGLEWVSAISGSGGSTYYADSVKGRFTISRDNSKNTLYLQMNSLRAEDTAVYYCAKIPQTGTFDYWGQGTLVTVSSGGGGSGGGGSGGGGSEIVLTQSPGTLSLSPGERATLSCRASQSVSSSYLAWYQQRPGQAPRLLIYGASSRATGIPDRFSGSGSGTDFTLTISRLEPEDFAVYYCQHYGSSPSWTFGQGTRLEIK

SEQ ID NO: 145 - protein, 248 aa, Artificial Sequence
  source: /note="Description of Artificial Sequence: Synthetic polypeptide"
EVQLVETGGGLVQPGGSLRLSCAASGFTFSSYAMSWVRQAPGKGLEWVSAISGSGGSTYYADSVKGRFTMSRENDKNSVFLQMNSLRVEDTGVYYCARANYKRELRYYYGMDVWGQGTMVTVSSGGGGSGGGGSGGGGSEIVMTQSPGTLSLSPGESATLSCRASQRVASNYLAWYQHKPGQAPSLLISGASSRATGVPDRFSGSGSGTDFTLAISRLEPEDSAVYYCQHYDSSPSWTFGQGTKVEIK

SEQ ID NO: 146 - protein, 244 aa, Artificial Sequence
  source: /note="Description of Artificial Sequence: Synthetic polypeptide"
EVQLLETGGGLVQPGGSLRLSCAASGFSFSSYAMSWVRQAPGKGLEWVSAISGSGGSTYYADSVKGRFTISRDNSKNTLYLQMNSLRAEDTAVYYCAKALVGATGAFDIWGQGTLVTVSSGGGGSGGGGSGGGGSEIVLTQSPGTLSLSPGERATLSCRASQSLSSNFLAWYQQKPGQAPGLLIYGASNWATGTPDRFSGSGSGTDFTLTITRLEPEDFAVYYCQYYGTSPMYTFGQGTKVEIK

SEQ ID NO: 147 - protein, 244 aa, Artificial Sequence
  source: /note="Description of Artificial Sequence: Synthetic polypeptide"
EVQLLESGGGLVQPGGSLRLSCAASGFTFSSYAMSWVRQAPGKGLEWVSAISGSGGSTYYADSVKGRFTISRDNSKNTLYLQMNSLRAEDTAVYYCVLWFGEGFDPWGQGTLVTVSSGGGGSGGGGSGGGGSDIVLTQSPLSLPVTPGEPASISCRSSQSLLHSNGYNYLDWYLQKPGQSPQLLIYLGSNRASGVPDRFSGSGSGTDFTLKISRVEAEDVGVYYCMQALQTPLTFGGGTKVDIK

SEQ ID NO: 148 - protein, 251 aa, Artificial Sequence
  source: /note="Description of Artificial Sequence: Synthetic polypeptide"
QVQLVESGGGLVQPGGSLRLSCAASGFTFSSYAMSWVRQAPGKGLEWVSAISGSGGSTYYADSVKGRFTISRDNSKNTLYLQMNSLRAEDTAVYYCAKVGYDSSGYYRDYYGMDVWGQGTTVTVSSGGGGSGGGGSGGGGSEIVLTQSPGTLSLSPGERATLSCRASQSVSSSYLAWYQQKPGQAPRLLIYGTSSRATGISDRFSGSGSGTDFTLTISRLEPEDFAVYYCQHYGNSPPKFTFGPGTKLEIK

SEQ ID NO: 149 - protein, 246 aa, Artificial Sequence
  source: /note="Description of Artificial Sequence: Synthetic polypeptide"
EVQLVESGGGLVQPGGSLRLSCAASGFTFSSYAMSWVRQAPGKGLEWVSAISGSGGSTYYADSVKGRFTISRDNSKNTLYLQMNSLRAEDTAVYYCAKMGWSSGYLGAFDIWGQGTTVTVSSGGGGSGGGGSGGGGSEIVLTQSPGTLSLSPGERATLSCRASQSVASSFLAWYQQKPGQAPRLLIYGASGRATGIPDRFSGSGSGTDFTLTISRLEPEDFAVYYCQHYGGSPRLTFGGGTKVDIK

SEQ ID NO: 150 - DNA, 729 bp, Artificial Sequence
  source: /note="Description of Artificial Sequence: Synthetic polynucleotide"
caagtgcagcttcaggaaagcggaccgggcctggtcaagccatccgaaactctctccctgacttgcactgtgtctggcggttccatctcatcgtcgtactactactggggctggattaggcagccgcccggaaagggactggagtggatcggaagcatctactattccggctcggcgtactacaaccctagcctcaagtcgagagtgaccatctccgtggatacctccaagaaccagttttccctgcgcctgagctccgtgaccgccgctgacaccgccgtgtactactgtgctcggcattggcaggaatggcccgatgccttcgacatttggggccagggcactatggtcactgtgtcatccgggggtggaggcagcgggggaggagggtccggggggggaggttcagagacaaccttgacccagtcacccgcattcatgtccgccactccgggagacaaggtcatcatctcgtgcaaagcgtcccaggatatcgacgatgccatgaattggtaccagcagaagcctggcgaagcgccgctgttcattatccaatccgcaacctcgcccgtgcctggaatcccaccgcggttcagcggcagcggtttcggaaccgacttttccctgaccattaacaacattgagtccgaggacgccgcctactacttctgcctgcaacacgacaacttccctctcacgttcggccagggaaccaagctggaaatcaag

SEQ ID NO: 151 - DNA, 735 bp, Artificial Sequence
  source: /note="Description of Artificial Sequence: Synthetic polynucleotide"
caagtcaatctgcgcgaatccggccccgccttggtcaagcctacccagaccctcactctgacctgtactttctccggcttctccctgcggacttccgggatgtgcgtgtcctggatcagacagcctccgggaaaggccctggagtggctcgctcgcattgactgggatgaggacaagttctactccacctcactcaagaccaggctgaccatcagcaaagatacctctgacaaccaagtggtgctccgcatgaccaacatggacccagccgacactgccacttactactgcgcgaggagcggagcgggcggaacctccgccaccgccttcgatatttggggcccgggtaccatggtcaccgtgtcaagcggaggaggggggtccgggggcggcggttccgggggaggcggatcggacattcagatgactcagtcaccatcgtccctgagcgctagcgtgggcgacagagtgacaatcacttgccgggcatcccaggacatctataacaaccttgcgtggttccagctgaagcctggttccgcaccgcggtcacttatgtacgccgccaacaagagccagtcgggagtgccgtcccggttttccggttcggcctcgggaactgacttcaccctgacgatctccagcctgcaacccgaggatttcgccacctactactgccagcactactaccgctttccctactcgttcggacagggaaccaagctggaaatcaag

SEQ ID NO: 152 - DNA, 738 bp, Artificial Sequence
  source: /note="Description of Artificial Sequence: Synthetic polynucleotide"
gaagtgcagcttgtcgaatccggggggggactggtcaagccgggcggatcactgagactgtcctgcgccgcgagcggcttcacgttctcctcctactccatgaactgggtccgccaagcccccgggaagggactggaatgggtgtcctctatctcctcgtcgtcgtcctacatctactacgccgactccgtgaagggaagattcaccatttcccgcgacaacgcaaagaactcactgtacttgcaaatgaactcactccgggccgaagatactgctgtgtactattgcgccaagactattgccgccgtctacgctttcgacatctggggccagggaaccaccgtgactgtgtcgtccggtggtggtggctcgggcggaggaggaagcggcggcggggggtccgagattgtgctgacccagtcgccactgagcctccctgtgacccccgaggaacccgccagcatcagctgccggtccagccagtccctgctccactccaacggatacaattacctcgattggtaccttcagaagcctggacaaagcccgcagctgctcatctacttgggatcaaaccgcgcgtcaggagtgcctgaccggttctccggctcgggcagcggtaccgatttcaccctgaaaatctccagggtggaggcagaggacgtgggagtgtattactgtatgcaggcgctgcagactccgtacacatttgggcagggcaccaagctggagatcaag

SEQ ID NO: 153 - DNA, 720 bp, Artificial Sequence
  source: /note="Description of Artificial Sequence: Synthetic polynucleotide"
gaagtccagctcgtggagtccggcggaggccttgtgaagcctggaggttcgctgagactgtcctgcgccgcctccggcttcaccttctccgactactacatgtcctggatcagacaggccccgggaaagggcctggaatgggtgtcctacatctcgtcatcgggcagcactatctactacgcggactcagtgaaggggcggttcaccatttcccgggataacgcgaagaactcgctgtatctgcaaatgaactcactgagggccgaggacaccgccgtgtactactgcgcccgcgatctccgcggggcatttgacatctggggacagggaaccatggtcacagtgtccagcggagggggaggatcgggtggcggaggttccgggggtggaggctcctcctacgtgctgactcagagcccaagcgtcagcgctgcgcccggttacacggcaaccatctcctgtggcggaaacaacattgggaccaagtctgtgcactggtatcagcagaagccgggccaagctcccctgttggtgatccgcgatgactccgtgcggcctagcaaaattccgggacggttctccggctccaacagcggcaatatggccactctcaccatctcgggagtgcaggccggagatgaagccgacttctactgccaagtctgggactcagactccgagcatgtggtgttcgggggcggaaccaagctgactgtgctc

SEQ ID NO: 154 - DNA, 723 bp, Artificial Sequence
  source: /note="Description of Artificial Sequence: Synthetic polynucleotide"
caagtgcagctggtgcagagcggggccgaagtcaagaagccgggagcctccgtgaaagtgtcctgcaagccttcgggatacaccgtgacctcccactacattcattgggtccgccgcgcccccggccaaggactcgagtggatgggcatgatcaaccctagcggcggagtgaccgcgtacagccagacgctgcagggacgcgtgactatgacctcggatacctcctcctccaccgtctatatggaactgtccagcctgcggtccgaggataccgccatgtactactgcgcccgggaaggatcaggctccgggtggtatttcgacttctggggaagaggcaccctcgtgactgtgtcatctgggggagggggttccggtggtggcggatcgggaggaggcggttcatcctacgtgctgacccagccaccctccgtgtccgtgagccccggccagactgcatcgattacatgtagcggcgacggcctctccaagaaatacgtgtcgtggtaccagcagaaggccggacagagcccggtggtgctgatctcaagagataaggagcggcctagcggaatcccggacaggttctcgggttccaactccgcggacactgctactctgaccatctcggggacccaggctatggacgaagccgattactactgccaagcctgggacgacactactgtcgtgtttggagggggcaccaagttgaccgtcctt

SEQ ID NO: 155 - DNA, 735 bp, Artificial Sequence
  source: /note="Description of Artificial Sequence: Synthetic polynucleotide"
caagtgcagcttcaggagagcggcccgggactcgtgaagccgtcccagaccctgtccctgacttgcaccgtgtcgggaggaagcatctcgagcggaggctactattggtcgtggattcggcagcaccctggaaagggcctggaatggatcggctacatctactactccggctcgacctactacaacccatcgctgaagtccagagtgacaatctcagtggacacgtccaagaatcagttcagcctgaagctctcttccgtgactgcggccgacaccgccgtgtactactgcgcacgcgctggaattgccgcccggctgaggggtgccttcgacatttggggacagggcaccatggtcaccgtgtcctccggcggcggaggttccgggggtggaggctcaggaggaggggggtccgacatcgtcatgactcagtcgccctcaagcgtcagcgcgtccgtcggggacagagtgatcatcacctgtcgggcgtcccagggaattcgcaactggctggcctggtatcagcagaagcccggaaaggcccccaacctgttgatctacgccgcctcaaacctccaatccggggtgccgagccgcttcagcggctccggttcgggtgccgatttcactctgaccatctcctccctgcaacctgaagatgtggctacctactactgccaaaagtacaactccgcaccttttactttcggaccggggaccaaagtggacattaag

SEQ ID NO: 156 - DNA, 759 bp, Artificial Sequence
  source: /note="Description of Artificial Sequence: Synthetic polynucleotide"
caagtgcagctggtccagtcgggcgccgaggtcaagaagcccgggagctctgtgaaagtgtcctgcaaggcctccgggggcacctttagctcctacgccatctcctgggtccgccaagcaccgggtcaaggcctggagtggatggggggaattatccctatcttcggcactgccaactacgcccagaagttccagggacgcgtgaccattaccgcggacgaatccacctccaccgcttatatggagctgtccagcttgcgctcggaagataccgccgtgtactactgcgcccggaggggtggataccagctgctgagatgggacgtgggcctcctgcggtcggcgttcgacatctggggccagggcactatggtcactgtgtccagcggaggaggcggatcgggaggcggcggatcagggggaggcggttccagctacgtgcttactcaacccccttcggtgtccgtggccccgggacagaccgccagaatcacttgcggaggaaacaacattgggtccaagagcgtgcattggtaccagcagaagccaggacaggcccctgtgctggtgctctacgggaagaacaatcggcccagcggagtgccggacaggttctcgggttcacgctccggtacaaccgcttcactgactatcaccggggcccaggcagaggatgaagcggactactactgttcctcccgggattcatccggcgaccacctccgggtgttcggaaccggaacgaaggtcaccgtgctg

SEQ ID NO: 157 - DNA, 744 bp, Artificial Sequence
  source: /note="Description of Artificial Sequence: Synthetic polynucleotide"
gaagtgcagctccaacagtcaggaccggggctcgtgaagccatcccagaccctgtccctgacttgtgccatctcgggagatagcgtgtcatcgaactccgccgcctggaactggattcggcagagcccgtcccgcggactggagtggcttggaaggacctactaccggtccaagtggtactctttctacgcgatctcgctgaagtcccgcattatcattaaccctgatacctccaagaatcagttctccctccaactgaaatccgtcacccccgaggacacagcagtgtattactgcgcacggagcagccccgaaggactgttcctgtattggtttgacccctggggccaggggactcttgtgaccgtgtcgagcggcggagatgggtccggtggcggtggttcggggggcggcggatcatcatccgaactgacccaggacccggctgtgtccgtggcgctgggacaaaccatccgcattacgtgccagggagactccctgggcaactactacgccacttggtaccagcagaagccgggccaagcccctgtgttggtcatctacgggaccaacaacagaccttccggcatccccgaccggttcagcgcttcgtcctccggcaacactgccagcctgaccatcactggagcgcaggccgaagatgaggccgactactactgcaacagcagagactcctcgggtcatcacctcttgttcggaactggaaccaaggtcaccgtgctg

SEQ ID NO: 158 - DNA, 738 bp, Artificial Sequence
  source: /note="Description of Artificial Sequence: Synthetic polynucleotide"
gaagtgcagctcgtggagtcaggaggcggcctggtccagccgggagggtcccttagactgtcatgcgccgcaagcggattcactttctcctcctatgccatgagctgggtccgccaagcccccggaaagggactggaatgggtgtccgccatctcggggtctggaggctcaacttactacgctgactccgtgaagggacggttcaccattagccgcgacaactccaagaacaccctctacctccaaatgaactccctgcgggccgaggataccgccgtctactactgcgccaaagtggaaggttcaggatcgctggactactggggacagggtactctcgtgaccgtgtcatcgggcggaggaggttccggcggtggcggctccggcggcggagggtcggagatcgtgatgacccagagccctggtactctgagcctttcgccgggagaaagggccaccctgtcctgccgcgcttcccaatccgtgtcctccgcgtacttggcgtggtaccagcagaagccgggacagccccctcggctgctgatcagcggggccagcacccgggcaaccggaatcccagacagattcgggggttccggcagcggcacagatttcaccctgactatttcgaggttggagcccgaggactttgcggtgtattactgtcagcactacgggtcgtcctttaatggctccagcctgttcacgttcggacaggggacccgcctggaaatcaag

SEQ ID NO: 159 - DNA, 723 bp, Artificial Sequence
  source: /note="Description of Artificial Sequence: Synthetic polynucleotide"
gaagtgcaactggtggaaaccggtggcggcctggtgcagcctggaggatcattgaggctgtcatgcgcggccagcggtattaccttctcccggtaccccatgtcctgggtcagacaggccccggggaaagggcttgaatgggtgtccgggatctcggactccggtgtcagcacttactacgccgactccgccaagggacgcttcaccatttcccgggacaactcgaagaacaccctgttcctccaaatgagctccctccgggacgaggatactgcagtgtactactgcgtgacccgcgccgggtccgaggcgtctgacatttggggacagggcactatggtcaccgtgtcgtccggcggagggggctcgggaggcggtggcagcggaggaggagggtccgagatcgtgctgacccaatccccggccaccctctcgctgagccctggagaaagggcaaccttgtcctgtcgcgcgagccagtccgtgagcaactccctggcctggtaccagcagaagcccggacaggctccgagacttctgatctacgacgcttcgagccgggccactggaatccccgaccgcttttcggggtccggctcaggaaccgatttcaccctgacaatctcacggctggagccagaggatttcgccatctattactgccagcagttcggtacttcctccggcctgactttcggaggcggcacgaagctcgaaatcaag

SEQ ID NO: 160 - DNA, 744 bp, Artificial Sequence
  source: /note="Description of Artificial Sequence: Synthetic polynucleotide"
caagtgcagctcgtggaatcgggtggcggactggtgcagccggggggctcacttagactgtcctgcgcggccagcggattcactttctcctcctacgccatgtcctgggtcagacaggcccctggaaagggcctggaatgggtgtccgcaatcagcggcagcggcggctcgacctattacgcggattcagtgaagggcagattcaccatttcccgggacaacgccaagaactccttgtaccttcaaatgaactccctccgcgcggaagataccgcaatctactactgcgctcgggccacttacaagagggaactgcgctactactacgggatggacgtctggggccagggaaccatggtcaccgtgtccagcggaggaggaggatcgggaggaggcggtagcgggggtggagggtcggagatcgtgatgacccagtcccccggcactgtgtcgctgtcccccggcgaacgggccaccctgtcatgtcgggccagccagtcagtgtcgtcaagcttcctcgcctggtaccagcagaaaccgggacaagctccccgcctgctgatctacggagccagcagccgggccaccggtattcctgaccggttctccggttcggggtccgggaccgactttactctgactatctctcgcctcgagccagaggactccgccgtgtattactgccagcagtaccactcctccccgtcctggacgttcggacagggcacaaggctggagattaag

SEQ ID NO: 161 - DNA, 744 bp, Artificial Sequence
  source: /note="Description of Artificial Sequence: Synthetic polynucleotide"
gaggtgcagcttgtggaaaccggtggcggactggtgcagcccggaggaagcctcaggctgtcctgcgccgcgtccggcttcaccttctcctcgtacgccatgtcctgggtccgccaggcccccggaaagggcctggaatgggtgtccgccatctctggaagcggaggttccacgtactacgcggacagcgtcaagggaaggttcacaatctcccgcgataattcgaagaacactctgtaccttcaaatgaacaccctgaaggccgaggacactgctgtgtactactgcgcacgggccacctacaagagagagctccggtactactacggaatggacgtctggggccagggaactactgtgaccgtgtcctcgggagggggtggctccggggggggcggctccggcggaggcggttccgagattgtgctgacccagtcaccttcaactctgtcgctgtccccgggagagagcgctactctgagctgccgggccagccagtccgtgtccaccaccttcctcgcctggtatcagcagaagccggggcaggcaccacggctcttgatctacgggtcaagcaacagagcgaccggaattcctgaccgcttctcggggagcggttcaggcaccgacttcaccctgactatccggcgcctggaacccgaagatttcgccgtgtattactgtcaacagtaccactcctcgccgtcctggacctttggccaaggaaccaaagtggaaatcaag

SEQ ID NO: 162 - DNA, 717 bp, Artificial Sequence
  source: /note="Description of Artificial Sequence: Synthetic polynucleotide"
gaagtgcagctcgtggaaactggaggtggactcgtgcagcctggacggtcgctgcggctgagctgcgctgcatccggcttcaccttcgacgattatgccatgcactgggtcagacaggcgccagggaagggacttgagtgggtgtccggtatcagctggaatagcggctcaatcggatacgcggactccgtgaagggaaggttcaccatttcccgcgacaacgccaagaactccctgtacttgcaaatgaacagcctccgggatgaggacactgccgtgtactactgcgcccgcgtcggaaaagctgtgcccgacgtctggggccagggaaccactgtgaccgtgtccagcggcgggggtggatcgggcggtggagggtccggtggagggggctcagatattgtgatgacccagaccccctcgtccctgtccgcctcggtcggcgaccgcgtgactatcacatgtagagcctcgcagagcatctccagctacctgaactggtatcagcagaagccggggaaggccccgaagctcctgatctacgcggcatcatcactgcaatcgggagtgccgagccggttttccgggtccggctccggcaccgacttcacgctgaccatttcttccctgcaacccgaggacttcgccacttactactgccagcagtcctactccaccccttactccttcggccaaggaaccaggctggaaatcaag

SEQ ID NO: 163 - DNA, 738 bp, Artificial Sequence
  source: /note="Description of Artificial Sequence: Synthetic polynucleotide"
gaagtgcagctcgtggagagcgggggaggattggtgcagcccggaaggtccctgcggctctcctgcactgcgtctggcttcaccttcgacgactacgcgatgcactgggtcagacagcgcccgggaaagggcctggaatgggtcgcctcaatcaactggaagggaaactccctggcctatggcgacagcgtgaagggccgcttcgccatttcgcgcgacaacgccaagaacaccgtgtttctgcaaatgaattccctgcggaccgaggataccgctgtgtactactgcgccagccaccagggcgtggcatactataactacgccatggacgtgtggggaagagggacgctcgtcaccgtgtcctccgggggcggtggatcgggtggaggaggaagcggtggcgggggcagcgaaatcgtgctgactcagagcccgggaactctttcactgtccccgggagaacgggccactctctcgtgccgggccacccagtccatcggctcctccttccttgcctggtaccagcagaggccaggacaggcgccccgcctgctgatctacggtgcttcccaacgcgccactggcattcctgaccggttcagcggcagagggtcgggaaccgatttcacactgaccatttcccgggtggagcccgaagattcggcagtctactactgtcagcattacgagtcctccccttcatggaccttcggtcaagggaccaaagtggagatcaag

SEQ ID NO: 164 - DNA, 723 bp, Artificial Sequence
  source: /note="Description of Artificial Sequence: Synthetic polynucleotide"
gaggtgcagttggtcgaaagcgggggcgggcttgtgcagcctggcggatcactgcggctgtcctgcgcggcatcaggcttcacgttttcttcctacgccatgtcctgggtgcgccaggcccctggaaagggactggaatgggtgtccgcgatttcggggtccggcgggagcacctactacgccgattccgtgaagggccgcttcactatctcgcgggacaactccaagaacaccctctacctccaaatgaatagcctgcgggccgaggataccgccgtctactattgcgctaaggtcgtgcgcgacggaatggacgtgtggggacagggtaccaccgtgacagtgtcctcggggggaggcggtagcggcggaggaggaagcggtggtggaggttccgagattgtgctgactcaatcacccgcgaccctgagcctgtcccccggcgaaagggccactctgtcctgtcgggccagccaatcagtctcctcctcgtacctggcctggtaccagcagaagccaggacaggctccgagactccttatctatggcgcatcctcccgcgccaccggaatcccggataggttctcgggaaacggatcggggaccgacttcactctcaccatctcccggctggaaccggaggacttcgccgtgtactactgccagcagtacggcagcccgcctagattcactttcggccccggcaccaaagtggacatcaag

SEQ ID NO: 165 - DNA, 726 bp, Artificial Sequence
  source: /note="Description of Artificial Sequence: Synthetic polynucleotide"
gaagtgcagctgctggagtccggcggtggattggtgcaaccggggggatcgctcagactgtcctgtgcggcgtcaggcttcaccttctcgagctacgccatgtcatgggtcagacaggcccctggaaagggtctggaatgggtgtccgccatttccgggagcgggggatctacatactacgccgatagcgtgaagggccgcttcaccatttcccgggacaactccaagaacactctctatctgcaaatgaactccctccgcgctgaggacactgccgtgtactactgcgccaaaatccctcagaccggcaccttcgactactggggacaggggactctggtcaccgtcagcagcggtggcggaggttcggggggaggaggaagcggcggcggagggtccgagattgtgctgacccagtcacccggcactttgtccctgtcgcctggagaaagggccaccctttcctgccgggcatcccaatccgtgtcctcctcgtacctggcctggtaccagcagaggcccggacaggccccacggcttctgatctacggagcaagcagccgcgcgaccggtatcccggaccggttttcgggctcgggctcaggaactgacttcaccctcaccatctcccgcctggaacccgaagatttcgctgtgtattactgccagcactacggcagctccccgtcctggacgttcggccagggaactcggctggagatcaag

SEQ ID NO: 166 - DNA, 744 bp, Artificial Sequence
  source: /note="Description of Artificial Sequence: Synthetic polynucleotide"
gaagtgcaactggtggaaaccggtggaggactcgtgcagcctggcggcagcctccggctgagctgcgccgcttcgggattcaccttttcctcctacgcgatgtcttgggtcagacaggcccccggaaaggggctggaatgggtgtcagccatctccggctccggcggatcaacgtactacgccgactccgtgaaaggccggttcaccatgtcgcgcgagaatgacaagaactccgtgttcctgcaaatgaactccctgagggtggaggacaccggagtgtactattgtgcgcgcgccaactacaagagagagctgcggtactactacggaatggacgtctggggacagggaactatggtgaccgtgtcatccggtggagggggaagcggcggtggaggcagcgggggcgggggttcagaaattgtcatgacccagtccccgggaactctttccctctcccccggggaatccgcgactttgtcctgccgggccagccagcgcgtggcctcgaactacctcgcatggtaccagcataagccaggccaagccccttccctgctgatttccggggctagcagccgcgccactggcgtgccggataggttctcgggaagcggctcgggtaccgatttcaccctggcaatctcgcggctggaaccggaggattcggccgtgtactactgccagcactatgactcatccccctcctggacattcggacagggcaccaaggtcgagatcaag

SEQ ID NO: 167 - DNA, 732 bp, Artificial Sequence
  source: /note="Description of Artificial Sequence: Synthetic polynucleotide"
gaagtgcagctgctcgaaaccggtggagggctggtgcagccagggggctccctgaggctttcatgcgccgctagcggattctccttctcctcttacgccatgtcgtgggtccgccaagcccctggaaaaggcctggaatgggtgtccgcgatttccgggagcggaggttcgacctattacgccgactccgtgaagggccgctttaccatctcccgggataactccaagaacactctgtacctccaaatgaactcgctgagagccgaggacaccgccgtgtattactgcgcgaaggcgctggtcggcgcgactggggcattcgacatctggggacagggaactcttgtgaccgtgtcgagcggaggcggcggctccggcggaggagggagcgggggcggtggttccgaaatcgtgttgactcagtccccgggaaccctgagcttgtcacccggggagcgggccactctctcctgtcgcgcctcccaatcgctctcatccaatttcctggcctggtaccagcagaagcccggacaggccccgggcctgctcatctacggcgcttcaaactgggcaacgggaacccctgatcggttcagcggaagcggatcgggtactgactttaccctgaccatcaccagactggaaccggaggacttcgccgtgtactactgccagtactacggcacctcccccatgtacacattcggacagggtaccaaggtcgagattaag

SEQ ID NO: 168 - DNA, 733 bp, Artificial Sequence
  source: /note="Description of Artificial Sequence: Synthetic polynucleotide"
gaagtgcagctgcttgagagcggtggaggtctggtgcagcccgggggatcactgcgcctgtcctgtgccgcgtccggtttcactttctcctcgtacgccatgtcgtgggtcagacaggcaccgggaaagggactggaatgggtgtcagccatttcgggttcggggggcagcacctactacgctgactccgtgaagggccggttcaccatttcccgcgacaactccaagaacaccttgtacctccaaatgaactccctgcgggccgaagataccgccgtgtattactgcgtgctgtggttcggagagggattcgacccgtggggacaaggaacactcgtgactgtgtcatccggcggaggcggcagcggtggcggcggttccggcggcggcggatctgacatcgtgttgacccagtcccctctgagcctgccggtcactcctggcgaaccagccagcatctcctgccggtcgagccagtccctcctgcactccaatgggtacaactacctcgattggtatctgcaaaagccgggccagagcccccagctgctgatctaccttgggtcaaaccgcgcttccggggtgcctgatagattctccgggtccgggagcggaaccgactttaccctgaaaatctcgagggtggaggccgaggacgtcggagtgtactactgcatgcaggcgctccagactcccctgaccttcggaggaggaacgaaggtcgacatcaaga

SEQ ID NO: 169 - DNA, 753 bp, Artificial Sequence
  source: /note="Description of Artificial Sequence: Synthetic polynucleotide"
caagtgcagctcgtggagtcaggcggaggactggtgcagcccgggggctccctgagactttcctgcgcggcatcgggttttaccttctcctcctatgctatgtcctgggtgcgccaggccccgggaaagggactggaatgggtgtccgcaatcagcggtagcgggggctcaacatactacgccgactccgtcaagggtcgcttcactatttcccgggacaactccaagaataccctgtacctccaaatgaacagcctcagggccgaggatactgccgtgtactactgcgccaaagtcggatacgatagctccggttactaccgggactactacggaatggacgtgtggggacagggcaccaccgtgaccgtgtcaagcggcggaggcggttcaggagggggaggctccggcggtggagggtccgaaatcgtcctgactcagtcgcctggcactctgtcgttgtccccgggggagcgcgctaccctgtcgtgtcgggcgtcgcagtccgtgtcgagctcctacctcgcgtggtaccagcagaagcccggacaggcccctagacttctgatctacggcacttcttcacgcgccaccgggatcagcgacaggttcagcggctccggctccgggaccgacttcaccctgaccattagccggctggagcctgaagatttcgccgtgtattactgccaacactacggaaactcgccgccaaagttcacgttcggacccggaaccaagctggaaatcaag

SEQ ID NO: 170 - DNA, 739 bp, Artificial Sequence
  source: /note="Description of Artificial Sequence: Synthetic polynucleotide"
gaagtccaactggtggagtccgggggagggctcgtgcagcccggaggcagccttcggctgtcgtgcgccgcctccgggttcacgttctcatcctacgcgatgtcgtgggtcagacaggcaccaggaaagggactggaatgggtgtccgccattagcggctccggcggtagcacctactatgccgactcagtgaagggaaggttcactatctcccgcgacaacagcaagaacaccctgtacctccaaatgaactctctgcgggccgaggataccgcggtgtactattgcgccaagatgggttggtccagcggatacttgggagccttcgacatttggggacagggcactactgtgaccgtgtcctccgggggtggcggatcgggaggcggcggctcgggtggagggggttccgaaatcgtgttgacccagtcaccgggaaccctctcgctgtccccgggagaacgggctacactgtcatgtagagcgtcccagtccgtggcttcctcgttcctggcctggtaccagcagaagccgggacaggcaccccgcctgctcatctacggagccagcggccgggcgaccggcatccctgaccgcttctccggttccggctcgggcaccgactttactctgaccattagcaggcttgagcccgaggattttgccgtgtactactgccaacactacggggggagccctcgcctgaccttcggaggcggaactaaggtcgatatcaaaa

SEQ ID NO: 171 - protein, 121 aa, Artificial Sequence
  source: /note="Description of Artificial Sequence: Synthetic polypeptide"
QVQLQESGPGLVKPSETLSLTCTVSGGSISSSYYYWGWIRQPPGKGLEWIGSIYYSGSAYYNPSLKSRVTISVDTSKNQFSLRLSSVTAADTAVYYCARHWQEWPDAFDIWGQGTMVTVSS

SEQ ID NO: 172 - protein, 123 aa, Artificial Sequence
  source: /note="Description of Artificial Sequence: Synthetic polypeptide"
QVNLRESGPALVKPTQTLTLTCTFSGFSLRTSGMCVSWIRQPPGKALEWLARIDWDEDKFYSTSLKTRLTISKDTSDNQVVLRMTNMDPADTATYYCARSGAGGTSATAFDIWGPGTMVTVSS

SEQ ID NO: 173 - protein, 119 aa, Artificial Sequence
  source: /note="Description of Artificial Sequence: Synthetic polypeptide"
EVQLVESGGGLVKPGGSLRLSCAASGFTFSSYSMNWVRQAPGKGLEWVSSISSSSSYIYYADSVKGRFTISRDNAKNSLYLQMNSLRAEDTAVYYCAKTIAAVYAFDIWGQGTTVTVSS

SEQ ID NO: 174 - protein, 117 aa, Artificial Sequence
  source: /note="Description of Artificial Sequence: Synthetic polypeptide"
EVQLVESGGGLVKPGGSLRLSCAASGFTFSDYYMSWIRQAPGKGLEWVSYISSSGSTIYYADSVKGRFTISRDNAKNSLYLQMNSLRAEDTAVYYCARDLRGAFDIWGQGTMVTVSS

SEQ ID NO: 175 - protein, 120 aa, Artificial Sequence
  source: /note="Description of Artificial Sequence: Synthetic polypeptide"
QVQLVQSGAEVKKPGASVKVSCKPSGYTVTSHYIHWVRRAPGQGLEWMGMINPSGGVTAYSQTLQGRVTMTSDTSSSTVYMELSSLRSEDTAMYYCAREGSGSGWYFDFWGRGTLVTVSS

SEQ ID NO: 176 - protein, 123 aa, Artificial Sequence
  source: /note="Description of Artificial Sequence: Synthetic polypeptide"
QVQLQESGPGLVKPSQTLSLTCTVSGGSISSGGYYWSWIRQHPGKGLEWIGYIYYSGSTYYNPSLKSRVTISVDTSKNQFSLKLSSVTAADTAVYYCARAGIAARLRGAFDIWGQGTMVTVSS

SEQ ID NO: 177 - protein, 129 aa, Artificial Sequence
  source: /note="Description of Artificial Sequence: Synthetic polypeptide"
QVQLVQSGAEVKKPGSSVKVSCKASGGTFSSYAISWVRQAPGQGLEWMGGIIPIFGTANYAQKFQGRVTITADESTSTAYMELSSLRSEDTAVYYCARRGGYQLLRWDVGLLRSAFDIWGQGTMVTVSS

SEQ ID NO: 178 - protein, 125 aa, Artificial Sequence
  source: /note="Description of Artificial Sequence: Synthetic polypeptide"
EVQLQQSGPGLVKPSQTLSLTCAISGDSVSSNSAAWNWIRQSPSRGLEWLGRTYYRSKWYSFYAISLKSRIIINPDTSKNQFSLQLKSVTPEDTAVYYCARSSPEGLFLYWFDPWGQGTLVTVSS

SEQ ID NO: 179 - protein, 118 aa, Artificial Sequence
  source: /note="Description of Artificial Sequence: Synthetic polypeptide"
EVQLVESGGGLVQPGGSLRLSCAASGFTFSSYAMSWVRQAPGKGLEWVSAISGSGGSTYYADSVKGRFTISRDNSKNTLYLQMNSLRAEDTAVYYCAKVEGSGSLDYWGQGTLVTVSS

SEQ ID NO: 180 - protein, 118 aa, Artificial Sequence
  source: /note="Description of Artificial Sequence: Synthetic polypeptide"
EVQLVETGGGLVQPGGSLRLSCAASGITFSRYPMSWVRQAPGKGLEWVSGISDSGVSTYYADSAKGRFTISRDNSKNTLFLQMSSLRDEDTAVYYCVTRAGSEASDIWGQGTMVTVSS

SEQ ID NO: 181 - protein, 124 aa, Artificial Sequence
  source: /note="Description of Artificial Sequence: Synthetic polypeptide"
QVQLVESGGGLVQPGGSLRLSCAASGFTFSSYAMSWVRQAPGKGLEWVSAISGSGGSTYYADSVKGRFTISRDNAKNSLYLQMNSLRAEDTAIYYCARATYKRELRYYYGMDVWGQGTMVTVSS

SEQ ID NO: 182 - protein, 124 aa, Artificial Sequence
  source: /note="Description of Artificial Sequence: Synthetic polypeptide"
EVQLVETGGGLVQPGGSLRLSCAASGFTFSSYAMSWVRQAPGKGLEWVSAISGSGGSTYYADSVKGRFTISRDNSKNTLYLQMNTLKAEDTAVYYCARATYKRELRYYYGMDVWGQGTTVTVSS

SEQ ID NO: 183 - protein, 117 aa, Artificial Sequence
  source: /note="Description of Artificial Sequence: Synthetic polypeptide"
EVQLVETGGGLVQPGRSLRLSCAASGFTFDDYAMHWVRQAPGKGLEWVSGISWNSGSIGYADSVKGRFTISRDNAKNSLYLQMNSLRDEDTAVYYCARVGKAVPDVWGQGTTVTVSS

SEQ ID NO: 184 - protein, 122 aa, Artificial Sequence
  source: /note="Description of Artificial Sequence: Synthetic polypeptide"
EVQLVESGGGLVQPGRSLRLSCTASGFTFDDYAMHWVRQRPGKGLEWVASINWKGNSLAYGDSVKGRFAISRDNAKNTVFLQMNSLRTEDTAVYYCASHQGVAYYNYAMDVWGRGTLVTVSS

SEQ ID NO: 185 - protein, 117 aa, Artificial Sequence
  source: /note="Description of Artificial Sequence: Synthetic polypeptide"
EVQLVESGGGLVQPGGSLRLSCAASGFTFSSYAMSWVRQAPGKGLEWVSAISGSGGSTYYADSVKGRFTISRDNSKNTLYLQMNSLRAEDTAVYYCAKVVRDGMDVWGQGTTVTVSS

SEQ ID NO: 186 - protein, 118 aa, Artificial Sequence
  source: /note="Description of Artificial Sequence: Synthetic polypeptide"
EVQLLESGGGLVQPGGSLRLSCAASGFTFSSYAMSWVRQAPGKGLEWVSAISGSGGSTYYADSVKGRFTISRDNSKNTLYLQMNSLRAEDTAVYYCAKIPQTGTFDYWGQGTLVTVSS

SEQ ID NO: 187 - protein, 124 aa, Artificial Sequence
  source: /note="Description of Artificial Sequence: Synthetic polypeptide"
EVQLVETGGGLVQPGGSLRLSCAASGFTFSSYAMSWVRQAPGKGLEWVSAISGSGGSTYYADSVKGRFTMSRENDKNSVFLQMNSLRVEDTGVYYCARANYKRELRYYYGMDVWGQGTMVTVSS

SEQ ID NO: 188 - protein, 120 aa, Artificial Sequence
  source: /note="Description of Artificial Sequence: Synthetic polypeptide"
EVQLLETGGGLVQPGGSLRLSCAASGFSFSSYAMSWVRQAPGKGLEWVSAISGSGGSTYYADSVKGRFTISRDNSKNTLYLQMNSLRAEDTAVYYCAKALVGATGAFDIWGQGTLVTVSS

SEQ ID NO: 189 - protein, 117 aa, Artificial Sequence
  source: /note="Description of Artificial Sequence: Synthetic polypeptide"
EVQLLESGGGLVQPGGSLRLSCAASGFTFSSYAMSWVRQAPGKGLEWVSAISGSGGSTYYADSVKGRFTISRDNSKNTLYLQMNSLRAEDTAVYYCVLWFGEGFDPWGQGTLVTVSS

SEQ ID NO: 190 - protein, 126 aa, Artificial Sequence
  source: /note="Description of Artificial Sequence: Synthetic polypeptide"
QVQLVESGGGLVQPGGSLRLSCAASGFTFSSYAMSWVRQAPGKGLEWVSAISGSGGSTYYADSVKGRFTISRDNSKNTLYLQMNSLRAEDTAVYYCAKVGYDSSGYYRDYYGMDVWGQGTTVTVSS

SEQ ID NO: 191 - protein, 122 aa, Artificial Sequence
  source: /note="Description of Artificial Sequence: Synthetic polypeptide"
EVQLVESGGGLVQPGGSLRLSCAASGFTFSSYAMSWVRQAPGKGLEWVSAISGSGGSTYYADSVKGRFTISRDNSKNTLYLQMNSLRAEDTAVYYCAKMGWSSGYLGAFDIWGQGTTVTVSS

SEQ ID NO: 192 - protein, 107 aa, Artificial Sequence
  source: /note="Description of Artificial Sequence: Synthetic polypeptide"
ETTLTQSPAFMSATPGDKVIISCKASQDIDDAMNWYQQKPGEAPLFIIQSATSPVPGIPPRFSGSGFGTDFSLTINNIESEDAAYYFCLQHDNFPLTFGQGTKLEIK

SEQ ID NO: 193 - protein, 107 aa, Artificial Sequence
  source: /note="Description of Artificial Sequence: Synthetic polypeptide"
DIQMTQSPSSLSASVGDRVTITCRASQDIYNNLAWFQLKPGSAPRSLMYAANKSQSGVPSRFSGSASGTDFTLTISSLQPEDFATYYCQHYYRFPYSFGQGTKLEIK

SEQ ID NO: 194 - protein, 112 aa, Artificial Sequence
  source: /note="Description of Artificial Sequence: Synthetic polypeptide"
EIVLTQSPLSLPVTPEEPASISCRSSQSLLHSNGYNYLDWYLQKPGQSPQLLIYLGSNRASGVPDRFSGSGSGTDFTLKISRVEAEDVGVYYCMQALQTPYTFGQGTKLEIK

SEQ ID NO: 195 - protein, 108 aa, Artificial Sequence
  source: /note="Description of Artificial Sequence: Synthetic polypeptide"
SYVLTQSPSVSAAPGYTATISCGGNNIGTKSVHWYQQKPGQAPLLVIRDDSVRPSKIPGRFSGSNSGNMATLTISGVQAGDEADFYCQVWDSDSEHVVFGGGTKLTVL

SEQ ID NO: 196 - protein, 106 aa, Artificial Sequence
  source: /note="Description of Artificial Sequence: Synthetic polypeptide"
SYVLTQPPSVSVSPGQTASITCSGDGLSKKYVSWYQQKAGQSPVVLISRDKERPSGIPDRFSGSNSADTATLTISGTQAMDEADYYCQAWDDTTVVFGGGTKLTVL

SEQ ID NO: 197 - protein, 107 aa, Artificial Sequence
  source: /note="Description of Artificial Sequence: Synthetic polypeptide"
DIVMTQSPSSVSASVGDRVIITCRASQGIRNWLAWYQQKPGKAPNLLIYAASNLQSGVPSRFSGSGSGADFTLTISSLQPEDVATYYCQKYNSAPFTFGPGTKVDIK

SEQ ID NO: 198 - protein, 109 aa, Artificial Sequence
  source: /note="Description of Artificial Sequence: Synthetic polypeptide"
SYVLTQPPSVSVAPGQTARITCGGNNIGSKSVHWYQQKPGQAPVLVLYGKNNRPSGVPDRFSGSRSGTTASLTITGAQAEDEADYYCSSRDSSGDHLRVFGTGTKVTVL

SEQ ID NO: 199 - protein, 108 aa, Artificial Sequence
  source: /note="Description of Artificial Sequence: Synthetic polypeptide"
SSELTQDPAVSVALGQTIRITCQGDSLGNYYATWYQQKPGQAPVLVIYGTNNRPSGIPDRFSASSSGNTASLTITGAQAEDEADYYCNSRDSSGHHLLFGTGTKVTVL

SEQ ID NO: 200 - protein, 113 aa, Artificial Sequence
  source: /note="Description of Artificial Sequence: Synthetic polypeptide"
EIVMTQSPGTLSLSPGERATLSCRASQSVSSAYLAWYQQKPGQPPRLLISGASTRATGIPDRFGGSGSGTDFTLTISRLEPEDFAVYYCQHYGSSFNGSSLFTFGQGTRLEIK

SEQ ID NO: 201 - protein, 108 aa, Artificial Sequence
  source: /note="Description of Artificial Sequence: Synthetic polypeptide"
EIVLTQSPATLSLSPGERATLSCRASQSVSNSLAWYQQKPGQAPRLLIYDASSRATGIPDRFSGSGSGTDFTLTISRLEPEDFAIYYCQQFGTSSGLTFGGGTKLEIK

SEQ ID NO: 202 - protein, 109 aa, Artificial Sequence
  source: /note="Description of Artificial Sequence: Synthetic polypeptide"
EIVMTQSPGTVSLSPGERATLSCRASQSVSSSFLAWYQQKPGQAPRLLIYGASSRATGIPDRFSGSGSGTDFTLTISRLEPEDSAVYYCQQYHSSPSWTFGQGTRLEIK

SEQ ID NO: 203 - protein, 109 aa, Artificial Sequence
  source: /note="Description of Artificial Sequence: Synthetic polypeptide"
EIVLTQSPSTLSLSPGESATLSCRASQSVSTTFLAWYQQKPGQAPRLLIYGSSNRATGIPDRFSGSGSGTDFTLTIRRLEPEDFAVYYCQQYHSSPSWTFGQGTKVEIK

SEQ ID NO: 204 - protein, 107 aa, Artificial Sequence
  source: /note="Description of Artificial Sequence: Synthetic polypeptide"
DIVMTQTPSSLSASVGDRVTITCRASQSISSYLNWYQQKPGKAPKLLIYAASSLQSGVPSRFSGSGSGTDFTLTISSLQPEDFATYYCQQSYSTPYSFGQGTRLEIK

SEQ ID NO: 205 - protein, 109 aa, Artificial Sequence
  source: /note="Description of Artificial Sequence: Synthetic polypeptide"
EIVLTQSPGTLSLSPGERATLSCRATQSIGSSFLAWYQQRPGQAPRLLIYGASQRATGIPDRFSGRGSGTDFTLTISRVEPEDSAVYYCQHYESSPSWTFGQGTKVEIK

SEQ ID NO: 206 - protein, 109 aa, Artificial Sequence
  source: /note="Description of Artificial Sequence: Synthetic polypeptide"
EIVLTQSPATLSLSPGERATLSCRASQSVSSSYLAWYQQKPGQAPRLLIYGASSRATGIPDRFSGNGSGTDFTLTISRLEPEDFAVYYCQQYGSPPRFTFGPGTKVDIK

SEQ ID NO: 207 - protein, 109 aa, Artificial Sequence
  source: /note="Description of Artificial Sequence: Synthetic polypeptide"
EIVLTQSPGTLSLSPGERATLSCRASQSVSSSYLAWYQQRPGQAPRLLIYGASSRATGIPDRFSGSGSGTDFTLTISRLEPEDFAVYYCQHYGSSPSWTFGQGTRLEIK

SEQ ID NO: 208 - protein, 109 aa, Artificial Sequence
  source: /note="Description of Artificial Sequence: Synthetic polypeptide"
EIVMTQSPGTLSLSPGESATLSCRASQRVASNYLAWYQHKPGQAPSLLISGASSRATGVPDRFSGSGSGTDFTLAISRLEPEDSAVYYCQHYDSSPSWTFGQGTKVEIK

SEQ ID NO: 209 - protein, 109 aa, Artificial Sequence
  source: /note="Description of Artificial Sequence: Synthetic polypeptide"
EIVLTQSPGTLSLSPGERATLSCRASQSLSSNFLAWYQQKPGQAPGLLIYGASNWATGTPDRFSGSGSGTDFTLTITRLEPEDFAVYYCQYYGTSPMYTFGQGTKVEIK

SEQ ID NO: 210 - protein, 112 aa, Artificial Sequence
  source: /note="Description of Artificial Sequence: Synthetic polypeptide"
DIVLTQSPLSLPVTPGEPASISCRSSQSLLHSNGYNYLDWYLQKPGQSPQLLIYLGSNRASGVPDRFSGSGSGTDFTLKISRVEAEDVGVYYCMQALQTPLTFGGGTKVDIK

SEQ ID NO: 211 - protein, 110 aa, Artificial Sequence
  source: /note="Description of Artificial Sequence: Synthetic polypeptide"
EIVLTQSPGTLSLSPGERATLSCRASQSVSSSYLAWYQQKPGQAPRLLIYGTSSRATGISDRFSGSGSGTDFTLTISRLEPEDFAVYYCQHYGNSPPKFTFGPGTKLEIK

SEQ ID NO: 212 - protein, 109 aa, Artificial Sequence
  source: /note="Description of Artificial Sequence: Synthetic polypeptide"
EIVLTQSPGTLSLSPGERATLSCRASQSVASSFLAWYQQKPGQAPRLLIYGASGRATGIPDRFSGSGSGTDFTLTISRLEPEDFAVYYCQHYGGSPRLTFGGGTKVDIK

SEQ ID NO: 213 - protein, 487 aa, Artificial Sequence
  source: /note="Description of Artificial Sequence: Synthetic polypeptide"
MALPVTALLLPLALLLHAARPQVQLQESGPGLVKPSETLSLTCTVSGGSISSSYYYWGWIRQPPGKGLEWIGSIYYSGSAYYNPSLKSRVTISVDTSKNQFSLRLSSVTAADTAVYYCARHWQEWPDAFDIWGQGTMVTVSSGGGGSGGGGSGGGGSETTLTQSPAFMSATPGDKVIISCKASQDIDDAMNWYQQKPGEAPLFIIQSATSPVPGIPPRFSGSGFGTDFSLTINNIESEDAAYYFCLQHDNFPLTFGQGTKLEIKTTTPAPRPPTPAPTIASQPLSLRPEACRPAAGGAVHTRGLDFACDIYIWAPLAGTCGVLLLSLVITLYCKRGRKKLLYIFKQPFMRPVQTTQEEDGCSCRFPEEEEGGCELRVKFSRSADAPAYKQGQNQLYNELNLGRREEYDVLDKRRGRDPEMGGKPRRKNPQEGLYNELQKDKMAEAYSEIGMKGERRRGKGHDGLYQGLSTATKDTYDALHMQALPPR

SEQ ID NO: 214 - protein, 489 aa, Artificial Sequence
  source: /note="Description of Artificial Sequence: Synthetic polypeptide"
MALPVTALLLPLALLLHAARPQVNLRESGPALVKPTQTLTLTCTFSGFSLRTSGMCVSWIRQPPGKALEWLARIDWDEDKFYSTSLKTRLTISKDTSDNQVVLRMTNMDPADTATYYCARSGAGGTSATAFDIWGPGTMVTVSSGGGGSGGGGSGGGGSDIQMTQSPSSLSASVGDRVTITCRASQDIYNNLAWFQLKPGSAPRSLMYAANKSQSGVPSRFSGSASGTDFTLTISSLQPEDFATYYCQHYYRFPYSFGQGTKLEIKTTTPAPRPPTPAPTIASQPLSLRPEACRPAAGGAVHTRGLDFACDIYIWAPLAGTCGVLLLSLVITLYCKRGRKKLLYIFKQPFMRPVQTTQEEDGCSCRFPEEEEGGCELRVKFSRSADAPAYKQGQNQLYNELNLGRREEYDVLDKRRGRDPEMGGKPRRKNPQEGLYNELQKDKMAEAYSEIGMKGERRRGKGHDGLYQGLSTATKDTYDALHMQALPPR

SEQ ID NO: 215 - protein, 490 aa, Artificial Sequence
  source: /note="Description of Artificial Sequence: Synthetic polypeptide"
MALPVTALLLPLALLLHAARPEVQLVESGGGLVKPGGSLRLSCAASGFTFSSYSMNWVRQAPGKGLEWVSSISSSSSYIYYADSVKGRFTISRDNAKNSLYLQMNSLRAEDTAVYYCAKTIAAVYAFDIWGQGTTVTVSSGGGGSGGGGSGGGGSEIVLTQSPLSLPVTPEEPASISCRSSQSLLHSNGYNYLDWYLQKPGQSPQLLIYLGSNRASGVPDRFSGSGSGTDFTLKISRVEAEDVGVYYCMQALQTPYTFGQGTKLEIKTTTPAPRPPTPAPTIASQPLSLRPEACRPAAGGAVHTRGLDFACDIYIWAPLAGTCGVLLLSLVITLYCKRGRKKLLYIFKQPFMRPVQTTQEEDGCSCRFPEEEEGGCELRVKFSRSADAPAYKQGQNQLYNELNLGRREEYDVLDKRRGRDPEMGGKPRRKNPQEGLYNELQKDKMAEAYSEIGMKGERRRGKGHDGLYQGLSTATKDTYDALHMQALPPR

SEQ ID NO: 216 - protein, 484 aa, Artificial Sequence
  source: /note="Description of Artificial Sequence: Synthetic polypeptide"
MALPVTALLLPLALLLHAARPEVQLVESGGGLVKPGGSLRLSCAASGFTFSDYYMSWIRQAPGKGLEWVSYISSSGSTIYYADSVKGRFTISRDNAKNSLYLQMNSLRAEDTAVYYCARDLRGAFDIWGQGTMVTVSSGGGGSGGGGSGGGGSSYVLTQSPSVSAAPGYTATISCGGNNIGTKSVHWYQQKPGQAPLLVIRDDSVRPSKIPGRFSGSNSGNMATLTISGVQAGDEADFYCQVWDSDSEHVVFGGGTKLTVLTTTPAPRPPTPAPTIASQPLSLRPEACRPAAGGAVHTRGLDFACDIYIWAPLAGTCGVLLLSLVITLYCKRGRKKLLYIFKQPFMRPVQTTQEEDGCSCRFPEEEEGGCELRVKFSRSADAPAYKQGQNQLYNELNLGRREEYDVLDKRRGRDPEMGGKPRRKNPQEGLYNELQKDKMAEAYSEIGMKGERRRGKGHDGLYQGLSTATKDTYDALHMQALPPR

SEQ ID NO: 217 - protein, 485 aa, Artificial Sequence
  source: /note="Description of Artificial Sequence: Synthetic polypeptide"
MALPVTALLLPLALLLHAARPQVQLVQSGAEVKKPGASVKVSCKPSGYTVTSHYIHWVRRAPGQGLEWMGMINPSGGVTAYSQTLQGRVTMTSDTSSSTVYMELSSLRSEDTAMYYCAREGSGSGWYFDFWGRGTLVTVSSGGGGSGGGGSGGGGSSYVLTQPPSVSVSPGQTASITCSGDGLSKKYVSWYQQKAGQSPVVLISRDKERPSGIPDRFSGSNSADTATLTISGTQAMDEADYYCQAWDDTTVVFGGGTKLTVLTTTPAPRPPTPAPTIASQPLSLRPEACRPAAGGAVHTRGLDFACDIYIWAPLAGTCGVLLLSLVITLYCKRGRKKLLYIFKQPFMRPVQTTQEEDGCSCRFPEEEEGGCELRVKFSRSADAPAYKQGQNQLYNELNLGRREEYDVLDKRRGRDPEMGGKPRRKNPQEGLYNELQKDKMAEAYSEIGMKGERRRGKGHDGLYQGLSTATKDTYDALHMQALPPR

SEQ ID NO: 218 - protein, 489 aa, Artificial Sequence
  source: /note="Description of Artificial Sequence: Synthetic polypeptide"
MALPVTALLLPLALLLHAARPQVQLQESGPGLVKPSQTLSLTCTVSGGSISSGGYYWSWIRQHPGKGLEWIGYIYYSGSTYYNPSLKSRVTISVDTSKNQFSLKLSSVTAADTAVYYCARAGIAARLRGAFDIWGQGTMVTVSSGGGGSGGGGSGGGGSDIVMTQSPSSVSASVGDRVIITCRASQGIRNWLAWYQQKPGKAPNLLIYAASNLQSGVPSRFSGSGSGADFTLTISSLQPEDVATYYCQKYNSAPFTFGPGTKVDIKTTTPAPRPPTPAPTIASQPLSLRPEACRPAAGGAVHTRGLDFACDIYIWAPLAGTCGVLLLSLVITLYCKRGRKKLLYIFKQPFMRPVQTTQEEDGCSCRFPEEEEGGCELRVKFSRSADAPAYKQGQNQLYNELNLGRREEYDVLDKRRGRDPEMGGKPRRKNPQEGLYNELQKDKMAEAYSEIGMKGERRRGKGHDGLYQGLSTATKDTYDALHMQALPPR

SEQ ID NO: 219 - protein, 497 aa, Artificial Sequence
  source: /note="Description of Artificial Sequence: Synthetic polypeptide"
MALPVTALLLPLALLLHAARPQVQLVQSGAEVKKPGSSVKVSCKASGGTFSSYAISWVRQAPGQGLEWMGGIIPIFGTANYAQKFQGRVTITADESTSTAYMELSSLRSEDTAVYYCARRGGYQLLRWDVGLLRSAFDIWGQGTMVTVSSGGGGSGGGGSGGGGSSYVLTQPPSVSVAPGQTARITCGGNNIGSKSVHWYQQKPGQAPVLVLYGKNNRPSGVPDRFSGSRSGTTASLTITGAQAEDEADYYCSSRDSSGDHLRVFGTGTKVTVLTTTPAPRPPTPAPTIASQPLSLRPEACRPAAGGAVHTRGLDFACDIYIWAPLAGTCGVLLLSLVITLYCKRGRKKLLYIFKQPFMRPVQTTQEEDGCSCRFPEEEEGGCELRVKFSRSADAPAYKQGQNQLYNELNLGRREEYDVLDKRRGRDPEMGGKPRRKNPQEGLYNELQKDKMAEAYSEIGMKGERRRGKGHDGLYQGLSTATKDTYDALHMQALPPR

SEQ ID NO: 220 - protein, 492 aa, Artificial Sequence
  source: /note="Description of Artificial Sequence: Synthetic polypeptide"
MALPVTALLLPLALLLHAARPEVQLQQSGPGLVKPSQTLSLTCAISGDSVSSNSAAWNWIRQSPSRGLEWLGRTYYRSKWYSFYAISLKSRIIINPDTSKNQFSLQLKSVTPEDTAVYYCARSSPEGLFLYWFDPWGQGTLVTVSSGGDGSGGGGSGGGGSSSELTQDPAVSVALGQTIRITCQGDSLGNYYATWYQQKPGQAPVLVIYGTNNRPSGIPDRFSASSSGNTASLTITGAQAEDEADYYCNSRDSSGHHLLFGTGTKVTVLTTTPAPRPPTPAPTIASQPLSLRPEACRPAAGGAVHTRGLDFACDIYIWAPLAGTCGVLLLSLVITLYCKRGRKKLLYIFKQPFMRPVQTTQEEDGCSCRFPEEEEGGCELRVKFSRSADAPAYKQGQNQLYNELNLGRREEYDVLDKRRGRDPEMGGKPRRKNPQEGLYNELQKDKMAEAYSEIGMKGERRRGKGHDGLYQGLSTATKDTYDALHMQALPPR

SEQ ID NO: 221 - protein, 490 aa, Artificial Sequence
  source: /note="Description of Artificial Sequence: Synthetic polypeptide"
MALPVTALLLPLALLLHAARPEVQLVESGGGLVQPGGSLRLSCAASGFTFSSYAMSWVRQAPGKGLEWVSAISGSGGSTYYADSVKGRFTISRDNSKNTLYLQMNSLRAEDTAVYYCAKVEGSGSLDYWGQGTLVTVSSGGGGSGGGGSGGGGSEIVMTQSPGTLSLSPGERATLSCRASQSVSSAYLAWYQQKPGQPPRLLISGASTRATGIPDRFGGSGSGTDFTLTISRLEPEDFAVYYCQHYGSSFNGSSLFTFGQGTRLEIKTTTPAPRPPTPAPTIASQPLSLRPEACRPAAGGAVHTRGLDFACDIYIWAPLAGTCGVLLLSLVITLYCKRGRKKLLYIFKQPFMRPVQTTQEEDGCSCRFPEEEEGGCELRVKFSRSADAPAYKQGQNQLYNELNLGRREEYDVLDKRRGRDPEMGGKPRRKNPQEGLYNELQKDKMAEAYSEIGMKGERRRGKGHDGLYQGLSTATKDTYDALHMQALPPR

SEQ ID NO: 222 - protein, 485 aa, Artificial Sequence
  source: /note="Description of Artificial Sequence: Synthetic polypeptide"
MALPVTALLLPLALLLHAARPEVQLVETGGGLVQPGGSLRLSCAASGITFSRYPMSWVRQAPGKGLEWVSGISDSGVSTYYADSAKGRFTISRDNSKNTLFLQMSSLRDEDTAVYYCVTRAGSEASDIWGQGTMVTVSSGGGGSGGGGSGGGGSEIVLTQSPATLSLSPGERATLSCRASQSVSNSLAWYQQKPGQAPRLLIYDASSRATGIPDRFSGSGSGTDFTLTISRLEPEDFAIYYCQQFGTSSGLTFGGGTKLEIKTTTPAPRPPTPAPTIASQPLSLRPEACRPAAGGAVHTRGLDFACDIYIWAPLAGTCGVLLLSLVITLYCKRGRKKLLYIFKQPFMRPVQTTQEEDGCSCRFPEEEEGGCELRVKFSRSADAPAYKQGQNQLYNELNLGRREEYDVLDKRRGRDPEMGGKPRRKNPQEGLYNELQKDKMAEAYSEIGMKGERRRGKGHDGLYQGLSTATKDTYDALHMQALPPR

SEQ ID NO: 223 - protein, 492 aa, Artificial Sequence
  source: /note="Description of Artificial Sequence: Synthetic polypeptide"
MALPVTALLLPLALLLHAARPQVQLVESGGGLVQPGGSLRLSCAASGFTFSSYAMSWVRQAPGKGLEWVSAISGSGGSTYYADSVKGRFTISRDNAKNSLYLQMNSLRAEDTAIYYCARATYKRELRYYYGMDVWGQGTMVTVSSGGGGSGGGGSGGGGSEIVMTQSPGTVSLSPGERATLSCRASQSVSSSFLAWYQQKPGQAPRLLIYGASSRATGIPDRFSGSGSGTDFTLTISRLEPEDSAVYYCQQYHSSPSWTFGQGTRLEIKTTTPAPRPPTPAPTIASQPLSLRPEACRPAAGGAVHTRGLDFACDIYIWAPLAGTCGVLLLSLVITLYCKRGRKKLLYIFKQPFMRPVQTTQEEDGCSCRFPEEEEGGCELRVKFSRSADAPAYKQGQNQLYNELNLGRREEYDVLDKRRGRDPEMGGKPRRKNPQEGLYNELQKDKMAEAYSEIGMKGERRRGKGHDGLYQGLSTATKDTYDALHMQALPPR

SEQ ID NO: 224 - protein, 492 aa, Artificial Sequence
  source: /note="Description of Artificial Sequence: Synthetic polypeptide"
MALPVTALLLPLALLLHAARPEVQLVETGGGLVQPGGSLRLSCAASGFTFSSYAMSWVRQAPGKGLEWVSAISGSGGSTYYADSVKGRFTISRDNSKNTLYLQMNTLKAEDTAVYYCARATYKRELRYYYGMDVWGQGTTVTVSSGGGGSGGGGSGGGGSEIVLTQSPSTLSLSPGESATLSCRASQSVSTTFLAWYQQKPGQAPRLLIYGSSNRATGIPDRFSGSGSGTDFTLTIRRLEPEDFAVYYCQQYHSSPSWTFGQGTKVEIKTTTPAPRPPTPAPTIASQPLSLRPEACRPAAGGAVHTRGLDFACDIYIWAPLAGTCGVLLLSLVITLYCKRGRKKLLYIFKQPFMRPVQTTQEEDGCSCRFPEEEEGGCELRVKFSRSADAPAYKQGQNQLYNELNLGRREEYDVLDKRRGRDPEMGGKPRRKNPQEGLYNELQKDKMAEAYSEIGMKGERRRGKGHDGLYQGLSTATKDTYDALHMQALPPR

SEQ ID NO: 225 - protein, 483 aa, Artificial Sequence
  source: /note="Description of Artificial Sequence: Synthetic polypeptide"
MALPVTALLLPLALLLHAARPEVQLVETGGGLVQPGRSLRLSCAASGFTFDDYAMHWVRQAPGKGLEWVSGISWNSGSIGYADSVKGRFTISRDNAKNSLYLQMNSLRDEDTAVYYCARVGKAVPDVWGQGTTVTVSSGGGGSGGGGSGGGGSDIVMTQTPSSLSASVGDRVTITCRASQSISSYLNWYQQKPGKAPKLLIYAASSLQSGVPSRFSGSGSGTDFTLTISSLQPEDFATYYCQQSYSTPYSFGQGTRLEIKTTTPAPRPPTPAPTIASQPLSLRPEACRPAAGGAVHTRGLDFACDIYIWAPLAGTCGVLLLSLVITLYCKRGRKKLLYIFKQPFMRPVQTTQEEDGCSCRFPEEEEGGCELRVKFSRSADAPAYKQGQNQLYNELNLGRREEYDVLDKRRGRDPEMGGKPRRKNPQEGLYNELQKDKMAEAYSEIGMKGERRRGKGHDGLYQGLSTATKDTYDALHMQALPPR

SEQ ID NO: 226 - protein, 490 aa, Artificial Sequence
  source: /note="Description of Artificial Sequence: Synthetic polypeptide"
MALPVTALLLPLALLLHAARPEVQLVESGGGLVQPGRSLRLSCTASGFTFDDYAMHWVRQRPGKGLEWVASINWKGNSLAYGDSVKGRFAISRDNAKNTVFLQMNSLRTEDTAVYYCASHQGVAYYNYAMDVWGRGTLVTVSSGGGGSGGGGSGGGGSEIVLTQSPGTLSLSPGERATLSCRATQSIGSSFLAWYQQRPGQAPRLLIYGASQRATGIPDRFSGRGSGTDFTLTISRVEPEDSAVYYCQHYESSPSWTFGQGTKVEIKTTTPAPRPPTPAPTIASQPLSLRPEACRPAAGGAVHTRGLDFACDIYIWAPLAGTCGVLLLSLVITLYCKRGRKKLLYIFKQPFMRPVQTTQEEDGCSCRFPEEEEGGCELRVKFSRSADAPAYKQGQNQLYNELNLGRREEYDVLDKRRGRDPEMGGKPRRKNPQEGLYNELQKDKMAEAYSEIGMKGERRRGKGHDGLYQGLSTATKDTYDALHMQALPPR

SEQ ID NO: 227 - protein, 485 aa, Artificial Sequence
  source: /note="Description of Artificial Sequence: Synthetic polypeptide"
MALPVTALLLPLALLLHAARPEVQLVESGGGLVQPGGSLRLSCAASGFTFSSYAMSWVRQAPGKGLEWVSAISGSGGSTYYADSVKGRFTISRDNSKNTLYLQMNSLRAEDTAVYYCAKVVRDGMDVWGQGTTVTVSSGGGGSGGGGSGGGGSEIVLTQSPATLSLSPGERATLSCRASQSVSSSYLAWYQQKPGQAPRLLIYGASSRATGIPDRFSGNGSGTDFTLTISRLEPEDFAVYYCQQYGSPPRFTFGPGTKVDIKTTTPAPRPPTPAPTIASQPLSLRPEACRPAAGGAVHTRGLDFACDIYIWAPLAGTCGVLLLSLVITLYCKRGRKKLLYIFKQPFMRPVQTTQEEDGCSCRFPEEEEGGCELRVKFSRSADAPAYKQGQNQLYNELNLGRREEYDVLDKRRGRDPEMGGKPRRKNPQEGLYNELQKDKMAEAYSEIGMKGERRRGKGHDGLYQGLSTATKDTYDALHMQALPPR

SEQ ID NO: 228 - protein, 486 aa, Artificial Sequence
  source: /note="Description of Artificial Sequence: Synthetic polypeptide"
MALPVTALLLPLALLLHAARPEVQLLESGGGLVQPGGSLRLSCAASGFTFSSYAMSWVRQAPGKGLEWVSAISGSGGSTYYADSVKGRFTISRDNSKNTLYLQMNSLRAEDTAVYYCAKIPQTGTFDYWGQGTLVTVSSGGGGSGGGGSGGGGSEIVLTQSPGTLSLSPGERATLSCRASQSVSSSYLAWYQQRPGQAPRLLIYGASSRATGIPDRFSGSGSGTDFTLTISRLEPEDFAVYYCQHYGSSPSWTFGQGTRLEIKTTTPAPRPPTPAPTIASQPLSLRPEACRPAAGGAVHTRGLDFACDIYIWAPLAGTCGVLLLSLVITLYCKRGRKKLLYIFKQPFMRPVQTTQEEDGCSCRFPEEEEGGCELRVKFSRSADAPAYKQGQNQLYNELNLGRREEYDVLDKRRGRDPEMGGKPRRKNPQEGLYNELQKDKMAEAYSEIGMKGERRRGKGHDGLYQGLSTATKDTYDALHMQALPPR

SEQ ID NO: 229 - protein, 492 aa, Artificial Sequence
  source: /note="Description of Artificial Sequence: Synthetic polypeptide"
MALPVTALLLPLALLLHAARPEVQLVETGGGLVQPGGSLRLSCAASGFTFSSYAMSWVRQAPGKGLEWVSAISGSGGSTYYADSVKGRFTMSRENDKNSVFLQMNSLRVEDTGVYYCARANYKRELRYYYGMDVWGQGTMVTVSSGGGGSGGGGSGGGGSEIVMTQSPGTLSLSPGESATLSCRASQRVASNYLAWYQHKPGQAPSLLISGASSRATGVPDRFSGSGSGTDFTLAISRLEPEDSAVYYCQHYDSSPSWTFGQGTKVEIKTTTPAPRPPTPAPTIASQPLSLRPEACRPAAGGAVHTRGLDFACDIYIWAPLAGTCGVLLLSLVITLYCKRGRKKLLYIFKQPFMRPVQTTQEEDGCSCRFPEEEEGGCELRVKFSRSADAPAYKQGQNQLYNELNLGRREEYDVLDKRRGRDPEMGGKPRRKNPQEGLYNELQKDKMAEAYSEIGMKGERRRGKGHDGLYQGLSTATKDTYDALHMQALPPR

SEQ ID NO: 230 - protein, 488 aa, Artificial Sequence
  source: /note="Description of Artificial Sequence: Synthetic polypeptide"
MALPVTALLLPLALLLHAARPEVQLLETGGGLVQPGGSLRLSCAASGFSFSSYAMSWVRQAPGKGLEWVSAISGSGGSTYYADSVKGRFTISRDNSKNTLYLQMNSLRAEDTAVYYCAKALVGATGAFDIWGQGTLVTVSSGGGGSGGGGSGGGGSEIVLTQSPGTLSLSPGERATLSCRASQSLSSNFLAWYQQKPGQAPGLLIYGASNWATGTPDRFSGSGSGTDFTLTITRLEPEDFAVYYCQYYGTSPMYTFGQGTKVEIKTTTPAPRPPTPAPTIASQPLSLRPEACRPAAGGAVHTRGLDFACDIYIWAPLAGTCGVLLLSLVITLYCKRGRKKLLYIFKQPFMRPVQTTQEEDGCSCRFPEEEEGGCELRVKFSRSADAPAYKQGQNQLYNELNLGRREEYDVLDKRRGRDPEMGGKPRRKNPQEGLYNELQKDKMAEAYSEIGMKGERRRGKGHDGLYQGLSTATKDTYDALHMQALPPR

SEQ ID NO: 231 - protein, 488 aa, Artificial Sequence
  source: /note="Description of Artificial Sequence: Synthetic polypeptide"
MALPVTALLLPLALLLHAARPEVQLLESGGGLVQPGGSLRLSCAASGFTFSSYAMSWVRQAPGKGLEWVSAISGSGGSTYYADSVKGRFTISRDNSKNTLYLQMNSLRAEDTAVYYCVLWFGEGFDPWGQGTLVTVSSGGGGSGGGGSGGGGSDIVLTQSPLSLPVTPGEPASISCRSSQSLLHSNGYNYLDWYLQKPGQSPQLLIYLGSNRASGVPDRFSGSGSGTDFTLKISRVEAEDVGVYYCMQALQTPLTFGGGTKVDIKTTTPAPRPPTPAPTIASQPLSLRPEACRPAAGGAVHTRGLDFACDIYIWAPLAGTCGVLLLSLVITLYCKRGRKKLLYIFKQPFMRPVQTTQEEDGCSCRFPEEEEGGCELRVKFSRSADAPAYKQGQNQLYNELNLGRREEYDVLDKRRGRDPEMGGKPRRKNPQEGLYNELQKDKMAEAYSEIGMKGERRRGKGHDGLYQGLSTATKDTYDALHMQALPPR

SEQ ID NO: 232 - protein, 495 aa, Artificial Sequence
  source: /note="Description of Artificial Sequence: Synthetic polypeptide"
MALPVTALLLPLALLLHAARPQVQLVESGGGLVQPGGSLRLSCAASGFTFSSYAMSWVRQAPGKGLEWVSAISGSGGSTYYADSVKGRFTISRDNSKNTLYLQMNSLRAEDTAVYYCAKVGYDSSGYYRDYYGMDVWGQGTTVTVSSGGGGSGGGGSGGGGSEIVLTQSPGTLSLSPGERATLSCRASQSVSSSYLAWYQQKPGQAPRLLIYGTSSRATGISDRFSGSGSGTDFTLTISRLEPEDFAVYYCQHYGNSPPKFTFGPGTKLEIKTTTPAPRPPTPAPTIASQPLSLRPEACRPAAGGAVHTRGLDFACDIYIWAPLAGTCGVLLLSLVITLYCKRGRKKLLYIFKQPFMRPVQTTQEEDGCSCRFPEEEEGGCELRVKFSRSADAPAYKQGQNQLYNELNLGRREEYDVLDKRRGRDPEMGGKPRRKNPQEGLYNELQKDKMAEAYSEIGMKGERRRGKGHDGLYQGLSTATKDTYDALHMQALPPR

SEQ ID NO: 233 - protein, 490 aa, Artificial Sequence
  source: /note="Description of Artificial Sequence: Synthetic polypeptide"
MALPVTALLLPLALLLHAARPEVQLVESGGGLVQPGGSLRLSCAASGFTFSSYAMSWVRQAPGKGLEWVSAISGSGGSTYYADSVKGRFTISRDNSKNTLYLQMNSLRAEDTAVYYCAKMGWSSGYLGAFDIWGQGTTVTVSSGGGGSGGGGSGGGGSEIVLTQSPGTLSLSPGERATLSCRASQSVASSFLAWYQQKPGQAPRLLIYGASGRATGIPDRFSGSGSGTDFTLTISRLEPEDFAVYYCQHYGGSPRLTFGGGTKVDIKTTTPAPRPPTPAPTIASQPLSLRPEACRPAAGGAVHTRGLDFACDIYIWAPLAGTCGVLLLSLVITLYCKRGRKKLLYIFKQPFMRPVQTTQEEDGCSCRFPEEEEGGCELRVKFSRSADAPAYKQGQNQLYNELNLGRREEYDVLDKRRGRDPEMGGKPRRKNPQEGLYNELQKDKMAEAYSEIGMKGERRRGKGHDGLYQGLSTATKDTYDALHMQALPPR

SEQ ID NO: 234 - DNA, 1461 bp, Artificial Sequence
  source: /note="Description of Artificial Sequence: Synthetic polynucleotide"
atggccctccctgtcaccgccctgctgcttccgctggctcttctgctccacgccgctcggccccaagtgcagcttcaggaaagcggaccgggcctggtcaagccatccgaaactctctccctgacttgcactgtgtctggcggttccatctcatcgtcgtactactactggggctggattaggcagccgcccggaaagggactggagtggatcggaagcatctactattccggctcggcgtactacaaccctagcctcaagtcgagagtgaccatctccgtggatacctccaagaaccagttttccctgcgcctgagctccgtgaccgccgctgacaccgccgtgtactactgtgctcggcattggcaggaatggcccgatgccttcgacatttggggccagggcactatggtcactgtgtcatccgggggtggaggcagcgggggaggagggtccggggggggaggttcagagacaaccttgacccagtcacccgcattcatgtccgccactccgggagacaaggtcatcatctcgtgcaaagcgtcccaggatatcgacgatgccatgaattggtaccagcagaagcctggcgaagcgccgctgttcattatccaatccgcaacctcgcccgtgcctggaatcccaccgcggttcagcggcagcggtttcggaaccgacttttccctgaccattaacaacattgagtccgaggacgccgcctactacttctgcctgcaacacgacaacttccctctcacgttcggccagggaaccaagctggaaatcaagaccactaccccagcaccgaggccacccaccccggctcctaccatcgcctcccagcctctgtccctgcgtccggaggcatgtagacccgcagctggtggggccgtgcatacccggggtcttgacttcgcctgcgatatctacatttgggcccctctggctggtacttgcggggtcctgctgctttcactcgtgatcactctttactgtaagcgcggtcggaagaagctgctgtacatctttaagcaacccttcatgaggcctgtgcagactactcaagaggaggacggctgttcatgccggttcccagaggaggaggaaggcggctgcgaactgcgcgtgaaattcagccgcagcgcagatgctccagcctacaagcaggggcagaaccagctctacaacgaactcaatcttggtcggagagaggagtacgacgtgctggacaagcggagaggacgggacccagaaatgggcgggaagccgcgcagaaagaatccccaagagggcctgtacaacgagctccaaaaggataagatggcagaagcctatagcgagattggtatgaaaggggaacgcagaagaggcaaaggccacgacggactgtaccagggactcagcaccgccaccaaggacacctatgacgctcttcacatgcaggccctgccgcctcgg

SEQ ID NO: 235 - DNA, 1467 bp, Artificial Sequence
  source: /note="Description of Artificial Sequence: Synthetic polynucleotide"
atggccctccctgtcaccgccctgctgcttccgctggctcttctgctccacgccgctcggccccaagtcaatctgcgcgaatccggccccgccttggtcaagcctacccagaccctcactctgacctgtactttctccggcttctccctgcggacttccgggatgtgcgtgtcctggatcagacagcctccgggaaaggccctggagtggctcgctcgcattgactgggatgaggacaagttctactccacctcactcaagaccaggctgaccatcagcaaagatacctctgacaaccaagtggtgctccgcatgaccaacatggacccagccgacactgccacttactactgcgcgaggagcggagcgggcggaacctccgccaccgccttcgatatttggggcccgggtaccatggtcaccgtgtcaagcggaggaggggggtccgggggcggcggttccgggggaggcggatcggacattcagatgactcagtcaccatcgtccctgagcgctagcgtgggcgacagagtgacaatcacttgccgggcatcccaggacatctataacaaccttgcgtggttccagctgaagcctggttccgcaccgcggtcacttatgtacgccgccaacaagagccagtcgggagtgccgtcccggttttccggttcggcctcgggaactgacttcaccctgacgatctccagcctgcaacccgaggatttcgccacctactactgccagcactactaccgctttccctactcgttcggacagggaaccaagctggaaatcaagaccactaccccagcaccgaggccacccaccccggctcctaccatcgcctcccagcctctgtccctgcgtccggaggcatgtagacccgcagctggtggggccgtgcatacccggggtcttgacttcgcctgcgatatctacatttgggcccctctggctggtacttgcggggtcctgctgctttcactcgtgatcactctttactgtaagcgcggtcggaagaagctgctgtacatctttaagcaacccttcatgaggcctgtgcagactactcaagaggaggacggctgttcatgccggttcccagaggaggaggaaggcggctgcgaactgcgcgtgaaattcagccgcagcgcagatgctccagcctacaagcaggggcagaaccagctctacaacgaactcaatcttggtcggagagaggagtacgacgtgctggacaagcggagaggacgggacccagaaatgggcgggaagccgcgcagaaagaatccccaagagggcctgtacaacgagctccaaaaggataagatggcagaagcctatagcgagattggtatgaaaggggaacgcagaagaggcaaaggccacgacggactgtaccagggactcagcaccgccaccaaggacacctatgacgctcttcacatgcaggccctgccgcctcgg

SEQ ID NO: 236 - DNA, 1470 bp, Artificial Sequence
  source: /note="Description of Artificial Sequence: Synthetic polynucleotide"
atggccctccctgtcaccgccctgctgcttccgctggctcttctgctccacgccgctcggcccgaagtgcagcttgtcgaatccggggggggactggtcaagccgggcggatcactgagactgtcctgcgccgcgagcggcttcacgttctcctcctactccatgaactgggtccgccaagcccccgggaagggactggaatgggtgtcctctatctcctcgtcgtcgtcctacatctactacgccgactccgtgaagggaagattcaccatttcccgcgacaacgcaaagaactcactgtacttgcaaatgaactcactccgggccgaagatactgctgtgtactattgcgccaagactattgccgccgtctacgctttcgacatctggggccagggaaccaccgtgactgtgtcgtccggtggtggtggctcgggcggaggaggaagcggcggcggggggtccgagattgtgctgacccagtcgccactgagcctccctgtgacccccgaggaacccgccagcatcagctgccggtccagccagtccctgctccactccaacggatacaattacctcgattggtaccttcagaagcctggacaaagcccgcagctgctcatctacttgggatcaaaccgcgcgtcaggagtgcctgaccggttctccggctcgggcagcggtaccgatttcaccctgaaaatctccagggtggaggcagaggacgtgggagtgtattactgtatgcaggcgctgcagactccgtacacatttgggcagggcaccaagctggagatcaagaccactaccccagcaccgaggccacccaccccggctcctaccatcgcctcccagcctctgtccctgcgtccggaggcatgtagacccgcagctggtggggccgtgcatacccggggtcttgacttcgcctgcgatatctacatttgggcccctctggctggtacttgcggggtcctgctgctttcactcgtgatcactctttactgtaagcgcggtcggaagaagctgctgtacatctttaagcaacccttcatgaggcctgtgcagactactcaagaggaggacggctgttcatgccggttcccagaggaggaggaaggcggctgcgaactgcgcgtgaaattcagccgcagcgcagatgctccagcctacaagcaggggcagaaccagctctacaacgaactcaatcttggtcggagagaggagtacgacgtgctggacaagcggagaggacgggacccagaaatgggcgggaagccgcgcagaaagaatccccaagagggcctgtacaacgagctccaaaaggataagatggcagaagcctatagcgagattggtatgaaaggggaacgcagaagaggcaaaggccacgacggactgtaccagggactcagcaccgccaccaaggacacctatgacgctcttcacatgcaggccctgccgcctcgg

SEQ ID NO: 237 - DNA, 1452 bp, Artificial Sequence
  source: /note="Description of Artificial Sequence: Synthetic polynucleotide"
atggccctccctgtcaccgccctgctgcttccgctggctcttctgctccacgccgctcggcccgaagtccagctcgtggagtccggcggaggccttgtgaagcctggaggttcgctgagactgtcctgcgccgcctccggcttcaccttctccgactactacatgtcctggatcagacaggccccgggaaagggcctggaatgggtgtcctacatctcgtcatcgggcagcactatctactacgcggactcagtgaaggggcggttcaccatttcccgggataacgcgaagaactcgctgtatctgcaaatgaactcactgagggccgaggacaccgccgtgtactactgcgcccgcgatctccgcggggcatttgacatctggggacagggaaccatggtcacagtgtccagcggagggggaggatcgggtggcggaggttccgggggtggaggctcctcctacgtgctgactcagagcccaagcgtcagcgctgcgcccggttacacggcaaccatctcctgtggcggaaacaacattgggaccaagtctgtgcactggtatcagcagaagccgggccaagctcccctgttggtgatccgcgatgactccgtgcggcctagcaaaattccgggacggttctccggctccaacagcggcaatatggccactctcaccatctcgggagtgcaggccggagatgaagccgacttctactgccaagtctgggactcagactccgagcatgtggtgttcgggggcggaaccaagctgactgtgctcaccactaccccagcaccgaggccacccaccccggctcctaccatcgcctcccagcctctgtccctgcgtccggaggcatgtagacccgcagctggtggggccgtgcatacccggggtcttgacttcgcctgcgatatctacatttgggcccctctggctggtacttgcggggtcctgctgctttcactcgtgatcactctttactgtaagcgcggtcggaagaagctgctgtacatctttaagcaacccttcatgaggcctgtgcagactactcaagaggaggacggctgttcatgccggttcccagaggaggaggaaggcggctgcgaactgcgcgtgaaattcagccgcagcgcagatgctccagcctacaagcaggggcagaaccagctctacaacgaactcaatcttggtcggagagaggagtacgacgtgctggacaagcggagaggacgggacccagaaatgggcgggaagccgcgcagaaagaatccccaagagggcctgtacaacgagctccaaaaggataagatggcagaagcctatagcgagattggtatgaaaggggaacgcagaagaggcaaaggccacgacggactgtaccagggactcagcaccgccaccaaggacacctatgacgctcttcacatgcaggccctgccgcctcgg

SEQ ID NO: 238 - DNA, 1455 bp, Artificial Sequence
  source: /note="Description of Artificial Sequence: Synthetic polynucleotide"
atggccctccctgtcaccgccctgctgcttccgctggctcttctgctccacgccgctcggccccaagtgcagctggtgcagagcggggccgaagtcaagaagccgggagcctccgtgaaagtgtcctgcaagccttcgggatacaccgtgacctcccactacattcattgggtccgccgcgcccccggccaaggactcgagtggatgggcatgatcaaccctagcggcggagtgaccgcgtacagccagacgctgcagggacgcgtgactatgacctcggatacctcctcctccaccgtctatatggaactgtccagcctgcggtccgaggataccgccatgtactactgcgcccgggaaggatcaggctccgggtggtatttcgacttctggggaagaggcaccctcgtgactgtgtcatctgggggagggggttccggtggtggcggatcgggaggaggcggttcatcctacgtgctgacccagccaccctccgtgtccgtgagccccggccagactgcatcgattacatgtagcggcgacggcctctccaagaaatacgtgtcgtggtaccagcagaaggccggacagagcccggtggtgctgatctcaagagataaggagcggcctagcggaatcccggacaggttctcgggttccaactccgcggacactgctactctgaccatctcggggacccaggctatggacgaagccgattactactgccaagcctgggacgacactactgtcgtgtttggagggggcaccaagttgaccgtccttaccactaccccagcaccgaggccacccaccccggctcctaccatcgcctcccagcctctgtccctgcgtccggaggcatgtagacccgcagctggtggggccgtgcatacccggggtcttgacttcgcctgcgatatctacatttgggcccctctggctggtacttgcggggtcctgctgctttcactcgtgatcactctttactgtaagcgcggtcggaagaagctgctgtacatctttaagcaacccttcatgaggcctgtgcagactactcaagaggaggacggctgttcatgccggttcccagaggaggaggaaggcggctgcgaactgcgcgtgaaattcagccgcagcgcagatgctccagcctacaagcaggggcagaaccagctctacaacgaactcaatcttggtcggagagaggagtacgacgtgctggacaagcggagaggacgggacccagaaatgggcgggaagccgcgcagaaagaatccccaagagggcctgtacaacgagctccaaaaggataagatggcagaagcctatagcgagattggtatgaaaggggaacgcagaagaggcaaaggccacgacggactgtaccagggactcagcaccgccaccaaggacacctatgacgctcttcacatgcaggccctgccgcctcgg

SEQ ID NO: 239 - DNA, 1467 bp, Artificial Sequence
  source: /note="Description of Artificial Sequence: Synthetic polynucleotide"
atggccctccctgtcaccgccctgctgcttccgctggctcttctgctccacgccgctcggccccaagtgcagcttcaggagagcggcccgggactcgtgaagccgtcccagaccctgtccctgacttgcaccgtgtcgggaggaagcatctcgagcggaggctactattggtcgtggattcggcagcaccctggaaagggcctggaatggatcggctacatctactactccggctcgacctactacaacccatcgctgaagtccagagtgacaatctcagtggacacgtccaagaatcagttcagcctgaagctctcttccgtgactgcggccgacaccgccgtgtactactgcgcacgcgctggaattgccgcccggctgaggggtgccttcgacatttggggacagggcaccatggtcaccgtgtcctccggcggcggaggttccgggggtggaggctcaggaggaggggggtccgacatcgtcatgactcagtcgccctcaagcgtcagcgcgtccgtcggggacagagtgatcatcacctgtcgggcgtcccagggaattcgcaactggctggcctggtatcagcagaagcccggaaaggcccccaacctgttgatctacgccgcctcaaacctccaatccggggtgccgagccgcttcagcggctccggttcgggtgccgatttcactctgaccatctcctccctgcaacctgaagatgtggctacctactactgccaaaagtacaactccgcaccttttactttcggaccggggaccaaagtggacattaagaccactaccccagcaccgaggccacccaccccggctcctaccatcgcctcccagcctctgtccctgcgtccggaggcatgtagacccgcagctggtggggccgtgcatacccggggtcttgacttcgcctgcgatatctacatttgggcccctctggctggtacttgcggggtcctgctgctttcactcgtgatcactctttactgtaagcgcggtcggaagaagctgctgtacatctttaagcaacccttcatgaggcctgtgcagactactcaagaggaggacggctgttcatgccggttcccagaggaggaggaaggcggctgcgaactgcgcgtgaaattcagccgcagcgcagatgctccagcctacaagcaggggcagaaccagctctacaacgaactcaatcttggtcggagagaggagtacgacgtgctggacaagcggagaggacgggacccagaaatgggcgggaagccgcgcagaaagaatccccaagagggcctgtacaacgagctccaaaaggataagatggcagaagcctatagcgagattggtatgaaaggggaacgcagaagaggcaaaggccacgacggactgtaccagggactcagcaccgccaccaaggacacctatgacgctcttcacatgcaggccctgccgcctcgg

SEQ ID NO: 240 - DNA, 1491 bp, Artificial Sequence
  source: /note="Description of Artificial Sequence: Synthetic polynucleotide"
atggccctccctgtcaccgccctgctgcttccgctggctcttctgctccacgccgctcggccccaagtgcagctggtccagtcgggcgccgaggtcaagaagcccgggagctctgtgaaagtgtcctgcaaggcctccgggggcacctttagctcctacgccatctcctgggtccgccaagcaccgggtcaaggcctggagtggatggggggaattatccctatcttcggcactgccaactacgcccagaagttccagggacgcgtgaccattaccgcggacgaatccacctccaccgcttatatggagctgtccagcttgcgctcggaagataccgccgtgtactactgcgcccggaggggtggataccagctgctgagatgggacgtgggcctcctgcggtcggcgttcgacatctggggccagggcactatggtcactgtgtccagcggaggaggcggatcgggaggcggcggatcagggggaggcggttccagctacgtgcttactcaacccccttcggtgtccgtggccccgggacagaccgccagaatcacttgcggaggaaacaacattgggtccaagagcgtgcattggtaccagcagaagccaggacaggcccctgtgctggtgctctacgggaagaacaatcggcccagcggagtgccggacaggttctcgggttcacgctccggtacaaccgcttcactgactatcaccggggcccaggcagaggatgaagcggactactactgttcctcccgggattcatccggcgaccacctccgggtgttcggaaccggaacgaaggtcaccgtgctgaccactaccccagcaccgaggccacccaccccggctcctaccatcgcctcccagcctctgtccctgcgtccggaggcatgtagacccgcagctggtggggccgtgcatacccggggtcttgacttcgcctgcgatatctacatttgggcccctctggctggtacttgcggggtcctgctgctttcactcgtgatcactctttactgtaagcgcggtcggaagaagctgctgtacatctttaagcaacccttcatgaggcctgtgcagactactcaagaggaggacggctgttcatgccggttcccagaggaggaggaaggcggctgcgaactgcgcgtgaaattcagccgcagcgcagatgctccagcctacaagcaggggcagaaccagctctacaacgaactcaatcttggtcggagagaggagtacgacgtgctggacaagcggagaggacgggacccagaaatgggcgggaagccgcgcagaaagaatccccaagagggcctgtacaacgagctccaaaaggataagatggcagaagcctatagcgagattggtatgaaaggggaacgcagaagaggcaaaggccacgacggactgtaccagggactcagcaccgccaccaaggacacctatgacgctcttcacatgcaggccctgccgcctcgg

SEQ ID NO: 241 - DNA, 1476 bp, Artificial Sequence
  source: /note="Description of Artificial Sequence: Synthetic polynucleotide"
atggccctccctgtcaccgccctgctgcttccgctggctcttctgctccacgccgctcggcccgaagtgcagctccaacagtcaggaccggggctcgtgaagccatcccagaccctgtccctgacttgtgccatctcgggagatagcgtgtcatcgaactccgccgcctggaactggattcggcagagcccgtcccgcggactggagtggcttggaaggacctactaccggtccaagtggtactctttctacgcgatctcgctgaagtcccgcattatcattaaccctgatacctccaagaatcagttctccctccaactgaaatccgtcacccccgaggacacagcagtgtattactgcgcacggagcagccccgaaggactgttcctgtattggtttgacccctggggccaggggactcttgtgaccgtgtcgagcggcggagatgggtccggtggcggtggttcggggggcggcggatcatcatccgaactgacccaggacccggctgtgtccgtggcgctgggacaaaccatccgcattacgtgccagggagactccctgggcaactactacgccacttggtaccagcagaagccgggccaagcccctgtgttggtcatctacgggaccaacaacagaccttccggcatccccgaccggttcagcgcttcgtcctccggcaacactgccagcctgaccatcactggagcgcaggccgaagatgaggccgactactactgcaacagcagagactcctcgggtcatcacctcttgttcggaactggaaccaaggtcaccgtgctgaccactaccccagcaccgaggccacccaccccggctcctaccatcgcctcccagcctctgtccctgcgtccggaggcatgtagacccgcagctggtggggccgtgcatacccggggtcttgacttcgcctgcgatatctacatttgggcccctctggctggtacttgcggggtcctgctgctttcactcgtgatcactctttactgtaagcgcggtcggaagaagctgctgtacatctttaagcaacccttcatgaggcctgtgcagactactcaagaggaggacggctgttcatgccggttcccagaggaggaggaaggcggctgcgaactgcgcgtgaaattcagccgcagcgcagatgctccagcctacaagcaggggcagaaccagctctacaacgaactcaatcttggtcggagagaggagtacgacgtgctggacaagcggagaggacgggacccagaaatgggcgggaagccgcgcagaaagaatccccaagagggcctgtacaacgagctccaaaaggataagatggcagaagcctatagcgagattggtatgaaaggggaacgcagaagaggcaaaggccacgacggactgtaccagggactcagcaccgccaccaaggacacctatgacgctcttcacatgcaggccctgccgcctcgg

SEQ ID NO: 242 - DNA, 1470 bp, Artificial Sequence
  source: /note="Description of Artificial Sequence: Synthetic polynucleotide"
atggccctccctgtcaccgccctgctgcttccgctggctcttctgctccacgccgctcggcccgaagtgcagctcgtggagtcaggaggcggcctggtccagccgggagggtcccttagactgtcatgcgccgcaagcggattcactttctcctcctatgccatgagctgggtccgccaagcccccggaaagggactggaatgggtgtccgccatctcggggtctggaggctcaacttactacgctgactccgtgaagggacggttcaccattagccgcgacaactccaagaacaccctctacctccaaatgaactccctgcgggccgaggataccgccgtctactactgcgccaaagtggaaggttcaggatcgctggactactggggacagggtactctcgtgaccgtgtcatcgggcggaggaggttccggcggtggcggctccggcggcggagggtcggagatcgtgatgacccagagccctggtactctgagcctttcgccgggagaaagggccaccctgtcctgccgcgcttcccaatccgtgtcctccgcgtacttggcgtggtaccagcagaagccgggacagccccctcggctgctgatcagcggggccagcacccgggcaaccggaatcccagacagattcgggggttccggcagcggcacagatttcaccctgactatttcgaggttggagcccgaggactttgcggtgtattactgtcagcactacgggtcgtcctttaatggctccagcctgttcacgttcggacaggggacccgcctggaaatcaagaccactaccccagcaccgaggccacccaccccggctcctaccatcgcctcccagcctctgtccctgcgtccggaggcatgtagacccgcagctggtggggccgtgcatacccggggtcttgacttcgcctgcgatatctacatttgggcccctctggctggtacttgcggggtcctgctgctttcactcgtgatcactctttactgtaagcgcggtcggaagaagctgctgtacatctttaagcaacccttcatgaggcctgtgcagactactcaagaggaggacggctgttcatgccggttcccagaggaggaggaaggcggctgcgaactgcgcgtgaaattcagccgcagcgcagatgctccagcctacaagcaggggcagaaccagctctacaacgaactcaatcttggtcggagagaggagtacgacgtgctggacaagcggagaggacgggacccagaaatgggcgggaagccgcgcagaaagaatccccaagagggcctgtacaacgagctccaaaaggataagatggcagaagcctatagcgagattggtatgaaaggggaacgcagaagaggcaaaggccacgacggactgtaccagggactcagcaccgccaccaaggacacctatgacgctcttcacatgcaggccctgccgcctcgg

SEQ ID NO: 243 - DNA, 1455 bp, Artificial Sequence
  source: /note="Description of Artificial Sequence: Synthetic polynucleotide"
atggccctccctgtcaccgccctgctgcttccgctggctcttctgctccacgccgctcggcccgaagtgcaactggtggaaaccggtggcggcctggtgcagcctggaggatcattgaggctgtcatgcgcggccagcggtattaccttctcccggtaccccatgtcctgggtcagacaggccccggggaaagggcttgaatgggtgtccgggatctcggactccggtgtcagcacttactacgccgactccgccaagggacgcttcaccatttcccgggacaactcgaagaacaccctgttcctccaaatgagctccctccgggacgaggatactgcagtgtactactgcgtgacccgcgccgggtccgaggcgtctgacatttggggacagggcactatggtcaccgtgtcgtccggcggagggggctcgggaggcggtggcagcggaggaggagggtccgagatcgtgctgacccaatccccggccaccctctcgctgagccctggagaaagggcaaccttgtcctgtcgcgcgagccagtccgtgagcaactccctggcctggtaccagcagaagcccggacaggctccgagacttctgatctacgacgcttcgagccgggccactggaatccccgaccgcttttcggggtccggctcaggaaccgatttcaccctgacaatctcacggctggagccagaggatttcgccatctattactgccagcagttcggtacttcctccggcctgactttcggaggcggcacgaagctcgaaatcaagaccactaccccagcaccgaggccacccaccccggctcctaccatcgcctcccagcctctgtccctgcgtccggaggcatgtagacccgcagctggtggggccgtgcatacccggggtcttgacttcgcctgcgatatctacatttgggcccctctggctggtacttgcggggtcctgctgctttcactcgtgatcactctttactgtaagcgcggtcggaagaagctgctgtacatctttaagcaacccttcatgaggcctgtgcagactactcaagaggaggacggctgttcatgccggttcccagaggaggaggaaggcggctgcgaactgcgcgtgaaattcagccgcagcgcagatgctccagcctacaagcaggggcagaaccagctctacaacgaactcaatcttggtcggagagaggagtacgacgtgctggacaagcggagaggacgggacccagaaatgggcgggaagccgcgcagaaagaatccccaagagggcctgtacaacgagctccaaaaggataagatggcagaagcctatagcgagattggtatgaaaggggaacgcagaagaggcaaaggccacgacggactgtaccagggactcagcaccgccaccaaggacacctatgacgctcttcacatgcaggccctgccgcctcgg

SEQ ID NO: 244 - DNA, 1476 bp, Artificial Sequence
  source: /note="Description of Artificial Sequence: Synthetic polynucleotide"
atggccctccctgtcaccgccctgctgcttccgctggctcttctgctccacgccgctcggccccaagtgcagctcgtggaatcgggtggcggactggtgcagccggggggctcacttagactgtcctgcgcggccagcggattcactttctcctcctacgccatgtcctgggtcagacaggcccctggaaagggcctggaatgggtgtccgcaatcagcggcagcggcggctcgacctattacgcggattcagtgaagggcagattcaccatttcccgggacaacgccaagaactccttgtaccttcaaatgaactccctccgcgcggaagataccgcaatctactactgcgctcgggccacttacaagagggaactgcgctactactacgggatggacgtctggggccagggaaccatggtcaccgtgtccagcggaggaggaggatcgggaggaggcggtagcgggggtggagggtcggagatcgtgatgacccagtcccccggcactgtgtcgctgtcccccggcgaacgggccaccctgtcatgtcgggccagccagtcagtgtcgtcaagcttcctcgcctggtaccagcagaaaccgggacaagctccccgcctgctgatctacggagccagcagccgggccaccggtattcctgaccggttctccggttcggggtccgggaccgactttactctgactatctctcgcctcgagccagaggactccgccgtgtattactgccagcagtaccactcctccccgtcctggacgttcggacagggcacaaggctggagattaagaccactaccccagcaccgaggccacccaccccggctcctaccatcgcctcccagcctctgtccctgcgtccggaggcatgtagacccgcagctggtggggccgtgcatacccggggtcttgacttcgcctgcgatatctacatttgggcccctctggctggtacttgcggggtcctgctgctttcactcgtgatcactctttactgtaagcgcggtcggaagaagctgctgtacatctttaagcaacccttcatgaggcctgtgcagactactcaagaggaggacggctgttcatgccggttcccagaggaggaggaaggcggctgcgaactgcgcgtgaaattcagccgcagcgcagatgctccagcctacaagcaggggcagaaccagctctacaacgaactcaatcttggtcggagagaggagtacgacgtgctggacaagcggagaggacgggacccagaaatgggcgggaagccgcgcagaaagaatccccaagagggcctgtacaacgagctccaaaaggataagatggcagaagcctatagcgagattggtatgaaaggggaacgcagaagaggcaaaggccacgacggactgtaccagggactcagcaccgccaccaaggacacctatgacgctcttcacatgcaggccctgccgcctcgg

SEQ ID NO: 245 - DNA, 1476 bp, Artificial Sequence
  source: /note="Description of Artificial Sequence: Synthetic polynucleotide"
atggccctccctgtcaccgccctgctgcttccgctggctcttctgctccacgccgctcggcccgaggtgcagcttgtggaaaccggtggcggactggtgcagcccggaggaagcctcaggctgtcctgcgccgcgtccggcttcaccttctcctcgtacgccatgtcctgggtccgccaggcccccggaaagggcctggaatgggtgtccgccatctctggaagcggaggttccacgtactacgcggacagcgtcaagggaaggttcacaatctcccgcgataattcgaagaacactctgtaccttcaaatgaacaccctgaaggccgaggacactgctgtgtactactgcgcacgggccacctacaagagagagctccggtactactacggaatggacgtctggggccagggaactactgtgaccgtgtcctcgggagggggtggctccggggggggcggctccggcggaggcggttccgagattgtgctgacccagtcaccttcaactctgtcgctgtccccgggagagagcgctactctgagctgccgggccagccagtccgtgtccaccaccttcctcgcctggtatcagcagaagccggggcaggcaccacggctcttgatctacgggtcaagcaacagagcgaccggaattcctgaccgcttctcggggagcggttcaggcaccgacttcaccctgactatccggcgcctggaacccgaagatttcgccgtgtattactgtcaacagtaccactcctcgccgtcctggacctttggccaaggaaccaaagtggaaatcaagaccactaccccagcaccgaggccacccaccccggctcctaccatcgcctcccagcctctgtccctgcgtccggaggcatgtagacccgcagctggtggggccgtgcatacccggggtcttgacttcgcctgcgatatctacatttgggcccctctggctggtacttgcggggtcctgctgctttcactcgtgatcactctttactgtaagcgcggtcggaagaagctgctgtacatctttaagcaacccttcatgaggcctgtgcagactactcaagaggaggacggctgttcatgccggttcccagaggaggaggaaggcggctgcgaactgcgcgtgaaattcagccgcagcgcagatgctccagcctacaagcaggggcagaaccagctctacaacgaactcaatcttggtcggagagaggagtacgacgtgctggacaagcggagaggacgggacccagaaatgggcgggaagccgcgcagaaagaatccccaagagggcctgtacaacgagctccaaaaggataagatggcagaagcctatagcgagattggtatgaaaggggaacgcagaagaggcaaaggccacgacggactgtaccagggactcagcaccgccaccaaggacacctatgacgctcttcacatgcaggccctgccgcctcgg

SEQ ID NO: 246 - DNA, 1449 bp, Artificial Sequence
  source: /note="Description of Artificial Sequence: Synthetic polynucleotide"
atggccctccctgtcaccgccctgctgcttccgctggctcttctgctccacgccgctcggcccgaagtgcagctcgtggaaactggaggtggactcgtgcagcctggacggtcgctgcggctgagctgcgctgcatccggcttcaccttcgacgattatgccatgcactgggtcagacaggcgccagggaagggacttgagtgggtgtccggtatcagctggaatagcggctcaatcggatacgcggactccgtgaagggaaggttcaccatttcccgcgacaacgccaagaactccctgtacttgcaaatgaacagcctccgggatgaggacactgccgtgtactactgcgcccgcgtcggaaaagctgtgcccgacgtctggggccagggaaccactgtgaccgtgtccagcggcgggggtggatcgggcggtggagggtccggtggagggggctcagatattgtgatgacccagaccccctcgtccctgtccgcctcggtcggcgaccgcgtgactatcacatgtagagcctcgcagagcatctccagctacctgaactggtatcagcagaagccggggaaggccccgaagctcctgatctacgcggcatcatcactgcaatcgggagtgccgagccggttttccgggtccggctccggcaccgacttcacgctgaccatttcttccctgcaacccgaggacttcgccacttactactgccagcagtcctactccaccccttactccttcggccaaggaaccaggctggaaatcaagaccactaccccagcaccgaggccacccaccccggctcctaccatcgcctcccagcctctgtccctgcgtccggaggcatgtagacccgcagctggtggggccgtgcatacccggggtcttgacttcgcctgcgatatctacatttgggcccctctggctggtacttgcggggtcctgctgctttcactcgtgatcactctttactgtaagcgcggtcggaagaagctgctgtacatctttaagcaacccttcatgaggcctgtgcagactactcaagaggaggacggctgttcatgccggttcccagaggaggaggaaggcggctgcgaactgcgcgtgaaattcagccgcagcgcagatgctccagcctacaagcaggggcagaaccagctctacaacgaactcaatcttggtcggagagaggagtacgacgtgctggacaagcggagaggacgggacccagaaatgggcgggaagccgcgcagaaagaatccccaagagggcctgtacaacgagctccaaaaggataagatggcagaagcctatagcgagattggtatgaaaggggaacgcagaagaggcaaaggccacgacggactgtaccagggactcagcaccgccaccaaggacacctatgacgctcttcacatgcaggccctgccgcctcgg

SEQ ID NO: 247 - DNA, 1470 bp, Artificial Sequence
  source: /note="Description of Artificial Sequence: Synthetic polynucleotide"
atggccctccctgtcaccgccctgctgcttccgctggctcttctgctccacgccgctcggcccgaagtgcagctcgtggagagcgggggaggattggtgcagcccggaaggtccctgcggctctcctgcactgcgtctggcttcaccttcgacgactacgcgatgcactgggtcagacagcgcccgggaaagggcctggaatgggtcgcctcaatcaactggaagggaaactccctggcctatggcgacagcgtgaagggccgcttcgccatttcgcgcgacaacgccaagaacaccgtgtttctgcaaatgaattccctgcggaccgaggataccgctgtgtactactgcgccagccaccagggcgtggcatactataactacgccatggacgtgtggggaagagggacgctcgtcaccgtgtcctccgggggcggtggatcgggtggaggaggaagcggtggcgggggcagcgaaatcgtgctgactcagagcccgggaactctttcactgtccccgggagaacgggccactctctcgtgccgggccacccagtccatcggctcctccttccttgcctggtaccagcagaggccaggacaggcgccccgcctgctgatctacggtgcttcccaacgcgccactggcattcctgaccggttcagcggcagagggtcgggaaccgatttcacactgaccatttcccgggtggagcccgaagattcggcagtctactactgtcagcattacgagtcctccccttcatggaccttcggtcaagggaccaaagtggagatcaagaccactaccccagcaccgaggccacccaccccggctcctaccatcgcctcccagcctctgtccctgcgtccggaggcatgtagacccgcagctggtggggccgtgcatacccggggtcttgacttcgcctgcgatatctacatttgggcccctctggctggtacttgcggggtcctgctgctttcactcgtgatcactctttactgtaagcgcggtcggaagaagctgctgtacatctttaagcaacccttcatgaggcctgtgcagactactcaagaggaggacggctgttcatgccggttcccagaggaggaggaaggcggctgcgaactgcgcgtgaaattcagccgcagcgcagatgctccagcctacaagcaggggcagaaccagctctacaacgaactcaatcttggtcggagagaggagtacgacgtgctggacaagcggagaggacgggacccagaaatgggcgggaagccgcgcagaaagaatccccaagagggcctgtacaacgagctccaaaaggataagatggcagaagcctatagcgagattggtatgaaaggggaacgcagaagaggcaaaggccacgacggactgtaccagggactcagcaccgccaccaaggacacctatgacgctcttcacatgcaggccctgccgcctcgg

SEQ ID NO: 248 - DNA, 1455 bp, Artificial Sequence
  source: /note="Description of Artificial Sequence: Synthetic polynucleotide"
atggccctccctgtcaccgccctgctgcttccgctggctcttctgctccacgccgctcggcccgaggtgcagttggtcgaaagcgggggcgggcttgtgcagcctggcggatcactgcggctgtcctgcgcggcatcaggcttcacgttttcttcctacgccatgtcctgggtgcgccaggcccctggaaagggactggaatgggtgtccgcgatttcggggtccggcgggagcacctactacgccgattccgtgaagggccgcttcactatctcgcgggacaactccaagaacaccctctacctccaaatgaatagcctgcgggccgaggataccgccgtctactattgcgctaaggtcgtgcgcgacggaatggacgtgtggggacagggtaccaccgtgacagtgtcctcggggggaggcggtagcggcggaggaggaagcggtggtggaggttccgagattgtgctgactcaatcacccgcgaccctgagcctgtcccccggcgaaagggccactctgtcctgtcgggccagccaatcagtctcctcctcgtacctggcctggtaccagcagaagccaggacaggctccgagactccttatctatggcgcatcctcccgcgccaccggaatcccggataggttctcgggaaacggatcggggaccgacttcactctcaccatctcccggctggaaccggaggacttcgccgtgtactactgccagcagtacggcagcccgcctagattcactttcggccccggcaccaaagtggacatcaagaccactaccccagcaccgaggccacccaccccggctcctaccatcgcctcccagcctctgtccctgcgtccggaggcatgtagacccgcagctggtggggccgtgcatacccggggtcttgacttcgcctgcgatatctacatttgggcccctctggctggtacttgcggggtcctgctgctttcactcgtgatcactctttactgtaagcgcggtcggaagaagctgctgtacatctttaagcaacccttcatgaggcctgtgcagactactcaagaggaggacggctgttcatgccggttcccagaggaggaggaaggcggctgcgaactgcgcgtgaaattcagccgcagcgcagatgctccagcctacaagcaggggcagaaccagctctacaacgaactcaatcttggtcggagagaggagtacgacgtgctggacaagcggagaggacgggacccagaaatgggcgggaagccgcgcagaaagaatccccaagagggcctgtacaacgagctccaaaaggataagatggcagaagcctatagcgagattggtatgaaaggggaacgcagaagaggcaaaggccacgacggactgtaccagggactcagcaccgccaccaaggacacctatgacgctcttcacatgcaggccctgccgcctcgg

SEQ ID NO: 249 - DNA, 1458 bp, Artificial Sequence
  source: /note="Description of Artificial Sequence: Synthetic polynucleotide"
atggccctccctgtcaccgccctgctgcttccgctggctcttctgctccacgccgctcggcccgaagtgcagctgctggagtccggcggtggattggtgcaaccggggggatcgctcagactgtcctgtgcggcgtcaggcttcaccttctcgagctacgccatgtcatgggtcagacaggcccctggaaagggtctggaatgggtgtccgccatttccgggagcgggggatctacatactacgccgatagcgtgaagggccgcttcaccatttcccgggacaactccaagaacactctctatctgcaaatgaactccctccgcgctgaggacactgccgtgtactactgcgccaaaatccctcagaccggcaccttcgactactggggacaggggactctggtcaccgtcagcagcggtggcggaggttcggggggaggaggaagcggcggcggagggtccgagattgtgctgacccagtcacccggcactttgtccctgtcgcctggagaaagggccaccctttcctgccgggcatcccaatccgtgtcctcctcgtacctggcctggtaccagcagaggcccggacaggccccacggcttctgatctacggagcaagcagccgcgcgaccggtatcccggaccggttttcgggctcgggctcaggaactgacttcaccctcaccatctcccgcctggaacccgaagatttcgctgtgtattactgccagcactacggcagctccccgtcctggacgttcggccagggaactcggctggagatcaagaccactaccccagcaccgaggccacccaccccggctcctaccatcgcctcccagcctctgtccctgcgtccggaggcatgtagacccgcagctggtggggccgtgcatacccggggtcttgacttcgcctgcgatatctacatttgggcccctctggctggtacttgcggggtcctgctgctttcactcgtgatcactctttactgtaagcgcggtcggaagaagctgctgtacatctttaagcaacccttcatgaggcctgtgcagactactcaagaggaggacggctgttcatgccggttcccagaggaggaggaaggcggctgcgaactgcgcgtgaaattcagccgcagcgcagatgctccagcctacaagcaggggcagaaccagctctacaacgaactcaatcttggtcggagagaggagtacgacgtgctggacaagcggagaggacgggacccagaaatgggcgggaagccgcgcagaaagaatccccaagagggcctgtacaacgagctccaaaaggataagatggcagaagcctatagcgagattggtatgaaaggggaacgcagaagaggcaaaggccacgacggactgtaccagggactcagcaccgccaccaaggacacctatgacgctcttcacatgcaggccctgccgcctcgg

SEQ ID NO: 250 - DNA, 1476 bp, Artificial Sequence
  source: /note="Description of Artificial Sequence: Synthetic polynucleotide"
atggccctccctgtcaccgccctgctgcttccgctggctcttctgctccacgccgctcggcccgaagtgcaactggtggaaaccggtggaggactcgtgcagcctggcggcagcctccggctgagctgcgccgcttcgggattcaccttttcctcctacgcgatgtcttgggtcagacaggcccccggaaaggggctggaatgggtgtcagccatctccggctccggcggatcaacgtactacgccgactccgtgaaaggccggttcaccatgtcgcgcgagaatgacaagaactccgtgttcctgcaaatgaactccctgagggtggaggacaccggagtgtactattgtgcgcgcgccaactacaagagagagctgcggtactactacggaatggacgtctggggacagggaactatggtgaccgtgtcatccggtggagggggaagcggcggtggaggcagcgggggcgggggttcagaaattgtcatgacccagtccccgggaactctttccctctcccccggggaatccgcgactttgtcctgccgggccagccagcgcgtggcctcgaactacctcgcatggtaccagcataagccaggccaagccccttccctgctgatttccggggctagcagccgcgccactggcgtgccggataggttctcgggaagcggctcgggtaccgatttcaccctggcaatctcgcggctggaaccggaggattcggccgtgtactactgccagcactatgactcatccccctcctggacattcggacagggcaccaaggtcgagatcaagaccactaccccagcaccgaggccacccaccccggctcctaccatcgcctcccagcctctgtccctgcgtccggaggcatgtagacccgcagctggtggggccgtgcatacccggggtcttgacttcgcctgcgatatctacatttgggcccctctggctggtacttgcggggtcctgctgctttcactcgtgatcactctttactgtaagcgcggtcggaagaagctgctgtacatctttaagcaacccttcatgaggcctgtgcagactactcaagaggaggacggctgttcatgccggttcccagaggaggaggaaggcggctgcgaactgcgcgtgaaattcagccgcagcgcagatgctccagcctacaagcaggggcagaaccagctctacaacgaactcaatcttggtcggagagaggagtacgacgtgctggacaagcggagaggacgggacccagaaatgggcgggaagccgcgcagaaagaatccccaagagggcctgtacaacgagctccaaaaggataagatggcagaagcctatagcgagattggtatgaaaggggaacgcagaagaggcaaaggccacgacggactgtaccagggactcagcaccgccaccaaggacacctatgacgctcttcacatgcaggccctgccgcctcgg

SEQ ID NO: 251 - DNA, 1464 bp, Artificial Sequence
  source: /note="Description of Artificial Sequence: Synthetic polynucleotide"
atggccctccctgtcaccgccctgctgcttccgctggctcttctgctccacgccgctcggcccgaagtgcagctgctcgaaaccggtggagggctggtgcagccagggggctccctgaggctttcatgcgccgctagcggattctccttctcctcttacgccatgtcgtgggtccgccaagcccctggaaaaggcctggaatgggtgtccgcgatttccgggagcggaggttcgacctattacgccgactccgtgaagggccgctttaccatctcccgggataactccaagaacactctgtacctccaaatgaactcgctgagagccgaggacaccgccgtgtattactgcgcgaaggcgctggtcggcgcgactggggcattcgacatctggggacagggaactcttgtgaccgtgtcgagcggaggcggcggctccggcggaggagggagcgggggcggtggttccgaaatcgtgttgactcagtccccgggaaccctgagcttgtcacccggggagcgggccactctctcctgtcgcgcctcccaatcgctctcatccaatttcctggcctggtaccagcagaagcccggacaggccccgggcctgctcatctacggcgcttcaaactgggcaacgggaacccctgatcggttcagcggaagcggatcgggtactgactttaccctgaccatcaccagactggaaccggaggacttcgccgtgtactactgccagtactacggcacctcccccatgtacacattcggacagggtaccaaggtcgagattaagaccactaccccagcaccgaggccacccaccccggctcctaccatcgcctcccagcctctgtccctgcgtccggaggcatgtagacccgcagctggtggggccgtgcatacccggggtcttgacttcgcctgcgatatctacatttgggcccctctggctggtacttgcggggtcctgctgctttcactcgtgatcactctttactgtaagcgcggtcggaagaagctgctgtacatctttaagcaacccttcatgaggcctgtgcagactactcaagaggaggacggctgttcatgccggttcccagaggaggaggaaggcggctgcgaactgcgcgtgaaattcagccgcagcgcagatgctccagcctacaagcaggggcagaaccagctctacaacgaactcaatcttggtcggagagaggagtacgacgtgctggacaagcggagaggacgggacccagaaatgggcgggaagccgcgcagaaagaatccccaagagggcctgtacaacgagctccaaaaggataagatggcagaagcctatagcgagattggtatgaaaggggaacgcagaagaggcaaaggccacgacggactgtaccagggactcagcaccgccaccaaggacacctatgacgctcttcacatgcaggccctgccgcctcgg

SEQ ID NO: 252 - DNA, 1464 bp, Artificial Sequence
  source: /note="Description of Artificial Sequence: Synthetic polynucleotide"
atggccctccctgtcaccgccctgctgcttccgctggctcttctgctccacgccgctcggcccgaagtgcagctgcttgagagcggtggaggtctggtgcagcccgggggatcactgcgcctgtcctgtgccgcgtccggtttcactttctcctcgtacgccatgtcgtgggtcagacaggcaccgggaaagggactggaatgggtgtcagccatttcgggttcggggggcagcacctactacgctgactccgtgaagggccggttcaccatttcccgcgacaactccaagaacaccttgtacctccaaatgaactccctgcgggccgaagataccgccgtgtattactgcgtgctgtggttcggagagggattcgacccgtggggacaaggaacactcgtgactgtgtcatccggcggaggcggcagcggtggcggcggttccggcggcggcggatctgacatcgtgttgacccagtcccctctgagcctgccggtcactcctggcgaaccagccagcatctcctgccggtcgagccagtccctcctgcactccaatgggtacaactacctcgattggtatctgcaaaagccgggccagagcccccagctgctgatctaccttgggtcaaaccgcgcttccggggtgcctgatagattctccgggtccgggagcggaaccgactttaccctgaaaatctcgagggtggaggccgaggacgtcggagtgtactactgcatgcaggcgctccagactcccctgaccttcggaggaggaacgaaggtcgacatcaagaccactaccccagcaccgaggccacccaccccggctcctaccatcgcctcccagcctctgtccctgcgtccggaggcatgtagacccgcagctggtggggccgtgcatacccggggtcttgacttcgcctgcgatatctacatttgggcccctctggctggtacttgcggggtcctgctgctttcactcgtgatcactctttactgtaagcgcggtcggaagaagctgctgtacatctttaagcaacccttcatgaggcctgtgcagactactcaagaggaggacggctgttcatgccggttcccagaggaggaggaaggcggctgcgaactgcgcgtgaaattcagccgcagcgcagatgctccagcctacaagcaggggcagaaccagctctacaacgaactcaatcttggtcggagagaggagtacgacgtgctggacaagcggagaggacgggacccagaaatgggcgggaagccgcgcagaaagaatccccaagagggcctgtacaacgagctccaaaaggataagatggcagaagcctatagcgagattggtatgaaaggggaacgcagaagaggcaaaggccacgacggactgtaccagggactcagcaccgccaccaaggacacctatgacgctcttcacatgcaggccctgccgcctcgg

SEQ ID NO: 253 - DNA, 1485 bp, Artificial Sequence
  source: /note="Description of Artificial Sequence: Synthetic polynucleotide"
atggccctccctgtcaccgccctgctgcttccgctggctcttctgctccacgccgctcggccccaagtgcagctcgtggagtcaggcggaggactggtgcagcccgggggctccctgagactttcctgcgcggcatcgggttttaccttctcctcctatgctatgtcctgggtgcgccaggccccgggaaagggactggaatgggtgtccgcaatcagcggtagcgggggctcaacatactacgccgactccgtcaagggtcgcttcactatttcccgggacaactccaagaataccctgtacctccaaatgaacagcctcagggccgaggatactgccgtgtactactgcgccaaagtcggatacgatagctccggttactaccgggactactacggaatggacgtgtggggacagggcaccaccgtgaccgtgtcaagcggcggaggcggttcaggagggggaggctccggcggtggagggtccgaaatcgtcctgactcagtcgcctggcactctgtcgttgtccccgggggagcgcgctaccctgtcgtgtcgggcgtcgcagtccgtgtcgagctcctacctcgcgtggtaccagcagaagcccggacaggcccctagacttctgatctacggcacttcttcacgcgccaccgggatcagcgacaggttcagcggctccggctccgggaccgacttcaccctgaccattagccggctggagcctgaagatttcgccgtgtattactgccaacactacggaaactcgccgccaaagttcacgttcggacccggaaccaagctggaaatcaagaccactaccccagcaccgaggccacccaccccggctcctaccatcgcctcccagcctctgtccctgcgtccggaggcatgtagacccgcagctggtggggccgtgcatacccggggtcttgacttcgcctgcgatatctacatttgggcccctctggctggtacttgcggggtcctgctgctttcactcgtgatcactctttactgtaagcgcggtcggaagaagctgctgtacatctttaagcaacccttcatgaggcctgtgcagactactcaagaggaggacggctgttcatgccggttcccagaggaggaggaaggcggctgcgaactgcgcgtgaaattcagccgcagcgcagatgctccagcctacaagcaggggcagaaccagctctacaacgaactcaatcttggtcggagagaggagtacgacgtgctggacaagcggagaggacgggacccagaaatgggcgggaagccgcgcagaaagaatccccaagagggcctgtacaacgagctccaaaaggataagatggcagaagcctatagcgagattggtatgaaaggggaacgcagaagaggcaaaggccacgacggactgtaccagggactcagcaccgccaccaaggacacctatgacgctcttcacatgcaggccctgccgcctcgg

SEQ ID NO: 254 - DNA, 1470 bp, Artificial Sequence
  source: /note="Description of Artificial Sequence: Synthetic polynucleotide"
atggccctccctgtcaccgccctgctgcttccgctggctcttctgctccacgccgctcggcccgaagtccaactggtggagtccgggggagggctcgtgcagcccggaggcagccttcggctgtcgtgcgccgcctccgggttcacgttctcatcctacgcgatgtcgtgggtcagacaggcaccaggaaagggactggaatgggtgtccgccattagcggctccggcggtagcacctactatgccgactcagtgaagggaaggttcactatctcccgcgacaacagcaagaacaccctgtacctccaaatgaactctctgcgggccgaggataccgcggtgtactattgcgccaagatgggttggtccagcggatacttgggagccttcgacatttggggacagggcactactgtgaccgtgtcctccgggggtggcggatcgggaggcggcggctcgggtggagggggttccgaaatcgtgttgacccagtcaccgggaaccctctcgctgtccccgggagaacgggctacactgtcatgtagagcgtcccagtccgtggcttcctcgttcctggcctggtaccagcagaagccgggacaggcaccccgcctgctcatctacggagccagcggccgggcgaccggcatccctgaccgcttctccggttccggctcgggcaccgactttactctgaccattagcaggcttgagcccgaggattttgccgtgtactactgccaacactacggggggagccctcgcctgaccttcggaggcggaactaaggtcgatatcaaaaccactaccccagcaccgaggccacccaccccggctcctaccatcgcctcccagcctctgtccctgcgtccggaggcatgtagacccgcagctggtggggccgtgcatacccggggtcttgacttcgcctgcgatatctacatttgggcccctctggctggtacttgcggggtcctgctgctttcactcgtgatcactctttactgtaagcgcggtcggaagaagctgctgtacatctttaagcaacccttcatgaggcctgtgcagactactcaagaggaggacggctgttcatgccggttcccagaggaggaggaaggcggctgcgaactgcgcgtgaaattcagccgcagcgcagatgctccagcctacaagcaggggcagaaccagctctacaacgaactcaatcttggtcggagagaggagtacgacgtgctggacaagcggagaggacgggacccagaaatgggcgggaagccgcgcagaaagaatccccaagagggcctgtacaacgagctccaaaaggataagatggcagaagcctatagcgagattggtatgaaaggggaacgcagaagaggcaaaggccacgacggactgtaccagggactcagcaccgccaccaaggacacctatgacgctcttcacatgcaggccctgccgcctcgg

SEQ ID NO: 255-391 - skipped (137 entries)

SEQ ID NO: 392 - protein, 462 aa, Artificial Sequence
  source: /note="Description of Artificial Sequence: Synthetic polypeptide"
EVQLVESGGGLVQPGGSLRLSCAVSGFALSNHGMSWVRRAPGKGLEWVSGIVYSGSTYYAASVKGRFTISRDNSRNTLYLQMNSLRPEDTAIYYCSAHGGESDVWGQGTTVTVSSASGGGGSGGRASGGGGSDIQLTQSPSSLSASVGDRVTITCRASQSISSYLNWYQQKPGKAPKLLIYAASSLQSGVPSRFSGSGSGTDFTLTISSLQPEDFATYYCQQSYSTPYTFGQGTKVEIKTTTPAPRPPTPAPTIASQPLSLRPEACRPAAGGAVHTRGLDFACDIYIWAPLAGTCGVLLLSLVITLYCKRGRKKLLYIFKQPFMRPVQTTQEEDGCSCRFPEEEEGGCELRVKFSRSADAPAYKQGQNQLYNELNLGRREEYDVLDKRRGRDPEMGGKPRRKNPQEGLYNELQKDKMAEAYSEIGMKGERRRGKGHDGLYQGLSTATKDTYDALHMQALPPR

SEQ ID NO: 393 - protein, 445 aa, Artificial Sequence
  source: /note="Description of Artificial Sequence: Synthetic polypeptide"
EVQLVESGGGLVQPGGSLRLSCAVSGFALSNHGMSWVRRAPGKGLEWVSGIVYSGSTYYAASVKGRFTISRDNSRNTLYLQMNSLRPEDTAIYYCSAHGGESDVWGQGTTVTVSSDIQLTQSPSSLSASVGDRVTITCRASQSISSYLNWYQQKPGKAPKLLIYAASSLQSGVPSRFSGSGSGTDFTLTISSLQPEDFATYYCQQSYSTPYTFGQGTKVEIKTTTPAPRPPTPAPTIASQPLSLRPEACRPAAGGAVHTRGLDFACDIYIWAPLAGTCGVLLLSLVITLYCKRGRKKLLYIFKQPFMRPVQTTQEEDGCSCRFPEEEEGGCELRVKFSRSADAPAYKQGQNQLYNELNLGRREEYDVLDKRRGRDPEMGGKPRRKNPQEGLYNELQKDKMAEAYSEIGMKGERRRGKGHDGLYQGLSTATKDTYDALHMQALPPR

SEQ ID NO: 394-1000 - skipped (607 entries)

SEQ ID NO: 1001 - protein, 114 aa, Homo sapiens
NWVNVISDLKKIEDLIQSMHIDATLYTESDVHPSCKVTAMKCFLLELQVISLESGDASIHDTVENLIILANNSLSSNGNVTESGCKECEELEEKNIKEFLQSFVHIVQMFINTS

SEQ ID NO: 1002 - protein, 170 aa, Homo sapiens
ITCPPPMSVEHADIWVKSYSLYSRERYICNSGFKRKAGTSSLTECVLNKATNVAHWTTPSLKCIRDPALVHQRPAPPSTVTTAGVTPQPESLSPSGKEPAASSPSSNNTAATTAAIVPGSQLMPSKSPSTGTTEISSHESSHGTPSQTTAKNWELTASASHQPPGVYPQG

SEQ ID NO: 1003 - protein, 114 aa, Artificial Sequence
  source: /note="Description of Artificial Sequence: Synthetic polypeptide"
NWVNVISDLKKIEDLIQSMHIDATLYTESDVHPSCKVTAMKCFLLELQVISLESGDASIHDTVENLIILANDSLSSNGNVTESGCKECEELEEKNIKEFLQSFVHIVQMFINTS

SEQ ID NO: 1004 - protein, 297 aa, Artificial Sequence
  source: /note="Description of Artificial Sequence: Synthetic polypeptide"
ITCPPPMSVEHADIWVKSYSLYSRERYICNSGFKRKAGTSSLTECVLNKATNVAHWTTPSLKCIREPKSCDKTHTCPPCPAPELLGGPSVFLFPPKPKDTLMISRTPEVTCVVVDVSHEDPEVKFNWYVDGVEVHNAKTKPREEQYNSTYRVVSVLTVLHQDWLNGKEYKCKVSNKALPAPIEKTISKAKGQPREPQVYTLPPSRDELTKNQVSLTCLVKGFYPSDIAVEWESNGQPENNYKTTPPVLDSDGSFFLYSKLTVDKSRWQQGNVFSCSVMHEALHNHYTQKSLSLSPGK

SEQ ID NO: 1005 - protein, 114 aa, Artificial Sequence; identical to SEQ ID NO: 1001
  source: /note="Description of Artificial Sequence: Synthetic polypeptide"
  VARIANT (93)..(93): /replace="Lys"
  SITE (1)..(114): /note="Variant residues given in the sequence have no preference with respect to those in the annotations for variant positions"

SEQ ID NO: 1006 - protein, 77 aa, Artificial Sequence
  source: /note="Description of Artificial Sequence: Synthetic polypeptide"
ITCPPPMSVEHADIWVKSYSLYSRERYICNSGFKRKAGTSSLTECVLNKATNVAHWTTPSLKCIRDPALVHQRPAPP

SEQ ID NO: 1007 - protein, 135 aa, Homo sapiens
MVLGTIDLCSCFSAGLPKTEANWVNVISDLKKIEDLIQSMHIDATLYTESDVHPSCKVTAMKCFLLELQVISLESGDASIHDTVENLIILANNSLSSNGNVTESGCKECEELEEKNIKEFLQSFVHIVQMFINTS

SEQ ID NO: 1008 - protein, 267 aa, Homo sapiens
MAPRRARGCRTLGLPALLLLLLLRPPATRGITCPPPMSVEHADIWVKSYSLYSRERYICNSGFKRKAGTSSLTECVLNKATNVAHWTTPSLKCIRDPALVHQRPAPPSTVTTAGVTPQPESLSPSGKEPAASSPSSNNTAATTAAIVPGSQLMPSKSPSTGTTEISSHESSHGTPSQTTAKNWELTASASHQPPGVYPQGHSDTTVAISTSTVLLCGLSAVSLLACYLKSRQTPPLASVEMEAMEALPVTWGTSSRDEDLENCSHHL

SEQ ID NO: 1009 - protein, 40 aa, Artificial Sequence
  source: /note="Description of Artificial Sequence: Synthetic polypeptide"
  SITE (1)..(40): /note="This sequence may encompass 1-10 'Gly Gly Gly Ser' repeating units"
GGGSGGGSGGGSGGGSGGGSGGGSGGGSGGGSGGGSGGGS

SEQ ID NO: 1010 - protein, 20 aa, Artificial Sequence
  source: /note="Description of Artificial Sequence: Synthetic peptide"
GGGGSGGGGSGGGGSGGGGS

SEQ ID NO: 1011 - protein, 15 aa, Artificial Sequence
  source: /note="Description of Artificial Sequence: Synthetic peptide"
GGGGSGGGGSGGGGS

SEQ ID NO: 1012 - protein, 4 aa, Artificial Sequence
  source: /note="Description of Artificial Sequence: Synthetic peptide"
GGGS

SEQ ID NO: 1013 - DNA, 5000 bp, Artificial Sequence
  source: /note="Description of Artificial Sequence: Synthetic polynucleotide"
  misc_feature (1)..(5000): /note="This sequence may encompass 50-5000 nucleotides"
  source: /note="See specification as filed for detailed description of substitutions and preferred embodiments"
aaaaaaaaaaaaaaaaaaaaaaaaaaaaaaaaaaaaaaaaaaaaaaaaaaaaaaaaaaaaaaaaaaaaaaaaaaaaaaaaaaaaaaaaaaaaaaaaaaaaaaaaaaaaaaaaaaaaaaaaaaaaaaaaaaaaaaaaaaaaaaaaaaaaaaaaaaaaaaaaaaaaaaaaaaaaaaaaaaaaaaaaaaaaaaaaaaaaaaaaaaaaaaaaaaaaaaaaaaaaaaaaaaaaaaaaaaaaaaaaaaaaaaaaaaaaaaaaaaaaaaaaaaaaaaaaaaaaaaaaaaaaaaaaaaaaaaaaaaaaaaaaaaaaaaaaaaaaaaaaaaaaaaaaaaaaaaaaaaaaaaaaaaaaaaaaaaaaaaaaaaaaaaaaaaaaaaaaaaaaaaaaaaaaaaaaaaaaaaaaaaaaaaaaaaaaaaaaaaaaaaaaaaaaaaaaaaaaaaaaaaaaaaaaaaaaaaaaaaaaaaaaaaaaaaaaaaaaaaaaaaaaaaaaaaaaaaaaaaaaaaaaaaaaaaaaaaaaaaaaaaaaaaaaaaaaaaaaaaaaaaaaaaaaaaaaaaaaaaaaaaaaaaaaaaaaaaaaaaaaaaaaaaaaaaaaaaaaaaaaaaaaaaaaaaaaaaaaaaaaaaaaaaaaaaaaaaaaaaaaaaaaaaaaaaaaaaaaaaaaaaaaaaaaaaaaaaaaaaaaaaaaaaaaaaaaaaaaaaaaaaaaaaaaaaaaaaaaaaaaaaaaaaaaaaaaaaaaaaaaaaaaaaaaaaaaaaaaaaaaaaaaaaaaaaaaaaaaaaaaaaaaaaaaaaaaaaaaaaaaaaaaaaaaaaaaaaaaaaaaaaaaaaaaaaaaaaaaaaaaaaaaaaaaaaaaaaaaaaaaaaaaaaaaaaaaaaaaaaaaaaaaaaaaaaaaaaaaaaaaaaaaaaaaaaaaaaaaaaaaaaaaaaaaaaaaaaaaaaaaaaaaaaaaaaaaaaaaaaaaaaaaaaaaaaaaaaaaaaaaaaaaaaaaaaaaaaaaaaaaaaaaaaaaaaaaaaaaaaaaaaaaaaaaaaaaaaaaaaaaaaaaaaaaaaaaaaaaaaaaaaaaaaaaaaaaaaaaaaaaaaaaaaaaaaaaaaaaaaaaaaaaaaaaaaaaaaaaaaaaaaaaaaaaaaaaaaaaaaaaaaaaaaaaaaaaaaaaaaaaaaaaaaaaaaaaaaaaaaaaaaaaaaaaaaaaaaaaaaaaaaaaaaaaaaaaaaaaaaaaaaaaaaaaaaaaaaaaaaaaaaaaaaaaaaaaaaaaaaaaaaaaaaaaaaaaaaaaaaaaaaaaaaaaaaaaaaaaaaaaaaaaaaaaaaaaaaaaaaaaaaaaaaaaaaaaaaaaaaaaaaaaaaaaaaaaaaaaaaaaaaaaaaaaaaaaaaaaaaaaaaaaaaaaaaaaaaaaaaaaaaaaaaaaaaaaaaaaaaaaaaaaaaaaaaaaaaaaaaaaaaaaaaaaaaaaaaaaaaaaaaaaaaaaaaaaaaaaaaaaaaaaaaaaaaaaaaaaaaaaaaaaaaaaaaaaaaaaaaaaaaaaaaaaaaaaaaaaaaaaaaaaaaaaaaaaaaaaaaaaaaaaaaaaaaaaaaaaaaaaaaaaaaaaaaaaaaaaaaaaaaaaaaaaaaaaaaaaaaaaaaaaaaaaaaaaaaaaaaaaaaaaaaaaaaaaaaaaaaaaaaaaaaaaaaaaaaaaaaaaaaaaaaaaaaaaaaaaaaaaaaaaaaaaaaaaaaaaaaaaaaaaaaaaaaaaaaaaaaaaaaaaaaaaaaaaaaaaaaaaaaaaaaaaaaaaaaaaaaaaaaaaaaaaaaaaaaaaaaaaaaaaaaaaaaaaaaaaaaaaaaaaaaaaaaaaaaaaaaaaaaaaaaaaaaaaaaaaaaaaaaaaaaaaaaaaaaaaaaaaaaaaaaaaaaaaaaaaaaaaaaaaaaaaaaaaaaaaaaaaaaaaaaaaaaaaaaaaaaaaaaaaaaaaaaaaaaaaaaaaaaaaaaaaaaaaaaaaaaaaaaaaaaaaaaaaaaaaaaaaaaaaaaaaaaaaaaaaaaaaaaaaaaaaaaaaaaaaaaaaaaaaaaaaaaaaaaaaaaaaaaaaaaaaaaaaaaaaaaaaaaaaaaaaaaaaaaaaaaaaaaaaaaaaaaaaaaaaaaaaaaaaaaaaaaaaaaaaaaaaaaaaaaaaaaaaaaaaaaaaaaaaaaaaaaaaaaaaaaaaaaaaaaaaaaaaaaaaaaaaaaaaaaaaaaaaaaaaaaaaaaaaaaaaaaaaaaaaaaaaaaaaaaaaaaaaaaaaaaaaaaaaaaaaaaaaaaaaaaaaaaaaaaaaaaaaaaaaaaaaaaaaaaaaaaaaaaaaaaaaaaaaaaaaaaaaaaaaaaaaaaaaaaaaaaaaaaaaaaaaaaaaaaaaaaaaaaaaaaaaaaaaaaaaaaaaaaaaaaaaaaaaaaaaaaaaaaaaaaaaaaaaaaaaaaaaaaaaaaaaaaaaaaaaaaaaaaaaaaaaaaaaaaaaaaaaaaaaaaaaaaaaaaaaaaaaaaaaaaaaaaaaaaaaaaaaaaaaaaaaaaaaaaaaaaaaaaaaaaaaaaaaaaaaaaaaaaaaaaaaaaaaaaaaaaaaaaaaaaaaaaaaaaaaaaaaaaaaaaaaaaaaaaaaaaaaaaaaaaaaaaaaaaaaaaaaaaaaaaaaaaaaaaaaaaaaaaaaaaaaaaaaaaaaaaaaaaaaaaaaaaaaaaaaaaaaaaaaaaaaaaaaaaaaaaaaaaaaaaaaaaaaaaaaaaaaaaaaaaaaaaaaaaaaaaaaaaaaaaaaaaaaaaaaaaaaaaaaaaaaaaaaaaaaaaaaaaaaaaaaaaaaaaaaaaaaaaaaaaaaaaaaaaaaaaaaaaaaaaaaaaaaaaaaaaaaaaaaaaaaaaaaaaaaaaaaaaaaaaaaaaaaaaaaaaaaaaaaaaaaaaaaaaaaaaaaaaaaaaaaaaaaaaaaaaaaaaaaaaaaaaaaaaaaaaaaaaaaaaaaaaaaaaaaaaaaaaaaaaaaaaaaaaaaaaaaaaaaaaaaaaaaaaaaaaaaaaaaaaaaaaaaaaaaaaaaaaaaaaaaaaaaaaaaaaaaaaaaaaaaaaaaaaaaaaaaaaaaaaaaaaaaaaaaaaaaaaaaaaaaaaaaaaaaaaaaaaaaaaaaaaaaaaaaaaaaaaaaaaaaaaaaaaaaaaaaaaaaaaaaaaaaaaaaaaaaaaaaaaaaaaaaaaaaaaaaaaaaaaaaaaaaaaaaaaaaaaaaaaaaaaaaaaaaaaaaaaaaaaaaaaaaaaaaaaaaaaaaaaaaaaaaaaaaaaaaaaaaaaaaaaaaaaaaaaaaaaaaaaaaaaaaaaaaaaaaaaaaaaaaaaaaaaaaaaaaaaaaaaaaaaaaaaaaaaaaaaaaaaaaaaaaaaaaaaaaaaaaaaaaaaaaaaaaaaaaaaaaaaaaaaaaaaaaaaaaaaaaaaaaaaaaaaaaaaaaaaaaaaaaaaaaaaaaaaaaaaaaaaaaaaaaaaaaaaaaaaaaaaaaaaaaaaaaaaaaaaaaaaaaaaaaaaaaaaaaaaaaaaaaaaaaaaaaaaaaaaaaaaaaaaaaaaaaaaaaaaaaaaaaaaaaaaaaaaaaaaaaaaaaaaaaaaaaaaaaaaaaaaaaaaaaaaaaaaaaaaaaaaaaaaaaaaaaaaaaaaaaaaaaaaaaaaaaaaaaaaaaaaaaaaaaaaaaaaaaaaaaaaaaaaaaaaaaaaaaaaaaaaaaaaaaaaaaaaaaaaaaaaaaaaaaaaaaaaaaaaaaaaaaaaaaaaaaaaaaaaaaaaaaaaaaaaaaaaaaaaaaaaaaaaaaaaaaaaaaaaaaaaaaaaaaaaaaaaaaaaaaaaaaaaaaaaaaaaaaaaaaaaaaaaaaaaaaaaaaaaaaaaaaaaaaaaaaaaaaaaaaaaaaaaaaaaaaaaaaaaaaaaaaaaaaaaaaaaaaaaaaaaaaaaaaaaaaaaaaaaaaaaaaaaaaaaaaaaaaaaaaaaaaaaaaaaaaaaaaaaaaaaaaaaaaaaaaaaaaaaaaaaaaaaaaaaaaaaaaaaaaaaaaaaaaaaaaaaaaaaaaaaaaaaaaaaaaaaaaaaaaaaaaaaaaaaaaaaaaaaaaaaaaaaaaaaaaaaaaaaaaaaaaaaaaaaaaaaaaaaaaaaaaaaaaaaaaaaaaaaaaaaaaaaaaaaaaaaaaaaaaaaaaaaaaaaaaaaaaaaaaaaaaaaaaaaaaaaaaaaaaaaaaaaaaaaaaaaaaaaaaaaaaaaaaaaaaaaaaaaaaaaaaaaaaaaaaaaaaaaaaaaaaaaaaaaaaaaaaaaaaaaaaaaaaaaaaaaaaaaaaaaaaaaaaaaaaaaaaaaaaaaaaaaaaaaaaaaaaaaaaaaaaaaaaaaaaaaaaaaaaaaaaaaaaaaaaaaaaaaaaaaaaaaaaaaaaaaaaaaaaaaaaaaaaaaaaaaaaaaaaaaaaaaaaaaaaaaaaaaaaaaaaaaaaaaaaaaaaaaaaaaaaaaaaaaaaaaaaaaaaaaaaaaaaaaaaaaaaaaaaaaaaaaaaaaaaaaaaaaaaaaaaaaaaaaaaaaaaaaaaaaaaaaaaaaaaaaaaaaaaaaaaaaaaaaaaaaaaaaaaaaaaaaaaaaaaaaaaaaaaaaaaaaaaaaaaaaaaaaaaaaaaaaaaaaaaaaaaaaaaaaaaaaaaaaaaaaaaaaaaaaaaaaaaaaaaaaaaaaaaaaaaaaaaaaaaaaaaaaaaaaaaaaaaaaaaaaaaaaaaaaaaaaaaaaaaaaaaaaaaaaaaaaaaaaaaaaaaaaaaaaaaaaaaaaaaaaaaaaaaaaaaaaaaaaaaaaaaaaaaaaaaaaaaaaaaaaaaaaaaaaaaaaaaaaaaaaaaaaaaaaaaaaaaaaaaaaaaaaaaaaaaaaaaaaaaaaaaaaaaaaaaaaaaaaaaaaaaaaaaaaaaaaaaaaaaaaaaaaaaaaaaaaaaaaaaaaaaaaaaaaaaaaaaaaaaaaaaaaaaaaaaaaaaaaaaaaaaaaaaaaaaaaaaaaaaaaaaaaaaaaaa

SEQ ID NO: 1014 - DNA, 1184 bp, Artificial Sequence
  source: /note="Description of Artificial Sequence: Synthetic polynucleotide"
cgtgaggctccggtgcccgtcagtgggcagagcgcacatcgcccacagtccccgagaagttggggggaggggtcggcaattgaaccggtgcctagagaaggtggcgcggggtaaactgggaaagtgatgtcgtgtactggctccgcctttttcccgagggtgggggagaaccgtatataagtgcagtagtcgccgtgaacgttctttttcgcaacgggtttgccgccagaacacaggtaagtgccgtgtgtggttcccgcgggcctggcctctttacgggttatggcccttgcgtgccttgaattacttccacctggctgcagtacgtgattcttgatcccgagcttcgggttggaagtgggtgggagagttcgaggccttgcgcttaaggagccccttcgcctcgtgcttgagttgaggcctggcctgggcgctggggccgccgcgtgcgaatctggtggcaccttcgcgcctgtctcgctgctttcgataagtctctagccatttaaaatttttgatgacctgctgcgacgctttttttctggcaagatagtcttgtaaatgcgggccaagatctgcacactggtatttcggtttttggggccgcgggcggcgacggggcccgtgcgtcccagcgcacatgttcggcgaggcggggcctgcgagcgcggccaccgagaatcggacgggggtagtctcaagctggccggcctgctctggtgcctggcctcgcgccgccgtgtatcgccccgccctgggcggcaaggctggcccggtcggcaccagttgcgtgagcggaaagatggccgcttcccggccctgctgcagggagctcaaaatggaggacgcggcgctcgggagagcgggcgggtgagtcacccacacaaaggaaaagggcctttccgtcctcagccgtcgcttcatgtgactccacggagtaccgggcgccgtccaggcacctcgattagttctcgagcttttggagtacgtcgtctttaggttggggggaggggttttatgcgatggagtttccccacactgagtgggtggagactgaagttaggccagcttggcacttgatgtaattctccttggaatttgccctttttgagtttggatcttggttcattctcaagcctcagacagtggttcaaagtttttttcttccatttcaggtgtcgtga

SEQ ID NO: 1015 - protein, 21 aa, Artificial Sequence
  source: /note="Description of Artificial Sequence: Synthetic peptide"
MALPVTALLLPLALLLHAARP

SEQ ID NO: 1016 - DNA, 63 bp, Artificial Sequence
  source: /note="Description of Artificial Sequence: Synthetic oligonucleotide"
atggccctgcctgtgacagccctgctgctgcctctggctctgctgctgcatgccgctagaccc

SEQ ID NO: 1017 - DNA, 63 bp, Artificial Sequence
  source: /note="Description of Artificial Sequence: Synthetic oligonucleotide"
atggccctccctgtcaccgccctgctgcttccgctggctcttctgctccacgccgctcggccc

SEQ ID NO: 1018 - protein, 45 aa, Artificial Sequence
  source: /note="Description of Artificial Sequence: Synthetic polypeptide"
TTTPAPRPPTPAPTIASQPLSLRPEACRPAAGGAVHTRGLDFACD

SEQ ID NO: 1019 - DNA, 135 bp, Artificial Sequence
  source: /note="Description of Artificial Sequence: Synthetic polynucleotide"
accacgacgccagcgccgcgaccaccaacaccggcgcccaccatcgcgtcgcagcccctgtccctgcgcccagaggcgtgccggccagcggcggggggcgcagtgcacacgagggggctggacttcgcctgtgat

SEQ ID NO: 1020 - protein, 230 aa, Artificial Sequence
  source: /note="Description of Artificial Sequence: Synthetic polypeptide"
ESKYGPPCPPCPAPEFLGGPSVFLFPPKPKDTLMISRTPEVTCVVVDVSQEDPEVQFNWYVDGVEVHNAKTKPREEQFNSTYRVVSVLTVLHQDWLNGKEYKCKVSNKGLPSSIEKTISKAKGQPREPQVYTLPPSQEEMTKNQVSLTCLVKGFYPSDIAVEWESNGQPENNYKTTPPVLDSDGSFFLYSRLTVDKSRWQEGNVFSCSVMHEALHNHYTQKSLSLSLGKM

SEQ ID NO: 1021 - DNA, 690 bp, Artificial Sequence
  source: /note="Description of Artificial Sequence: Synthetic polynucleotide"
gagagcaagtacggccctccctgccccccttgccctgcccccgagttcctgggcggacccagcgtgttcctgttcccccccaagcccaaggacaccctgatgatcagccggacccccgaggtgacctgtgtggtggtggacgtgtcccaggaggaccccgaggtccagttcaactggtacgtggacggcgtggaggtgcacaacgccaagaccaagccccgggaggagcagttcaatagcacctaccgggtggtgtccgtgctgaccgtgctgcaccaggactggctgaacggcaaggaatacaagtgtaaggtgtccaacaagggcctgcccagcagcatcgagaaaaccatcagcaaggccaagggccagcctcgggagccccaggtgtacaccctgccccctagccaagaggagatgaccaagaaccaggtgtccctgacctgcctggtgaagggcttctaccccagcgacatcgccgtggagtgggagagcaacggccagcccgagaacaactacaagaccaccccccctgtgctggacagcgacggcagcttcttcctgtacagccggctgaccgtggacaagagccggtggcaggagggcaacgtctttagctgctccgtgatgcacgaggccctgcacaaccactacacccagaagagcctgagcctgtccctgggcaagatg

SEQ ID NO: 1022 - protein, 282 aa, Artificial Sequence
  source: /note="Description of Artificial Sequence: Synthetic polypeptide"
RWPESPKAQASSVPTAQPQAEGSLAKATTAPATTRNTGRGGEEKKKEKEKEEQEERETKTPECPSHTQPLGVYLLTPAVQDLWLRDKATFTCFVVGSDLKDAHLTWEVAGKVPTGGVEEGLLERHSNGSQSQHSRLTLPRSLWNAGTSVTCTLNHPSLPPQRLMALREPAAQAPVKLSLNLLASSDPPEAASWLLCEVSGFSPPNILLMWLEDQREVNTSGFAPARPPPQPGSTTFWAWSVLRVPAPPSPQPATYTCVVSHEDSRTLLNASRSLEVSYVTDH

SEQ ID NO: 1023 - DNA, 847 bp, Artificial Sequence
  source: /note="Description of Artificial Sequence: Synthetic polynucleotide"
aggtggcccgaaagtcccaaggcccaggcatctagtgttcctactgcacagccccaggcagaaggcagcctagccaaagctactactgcacctgccactacgcgcaatactggccgtggcggggaggagaagaaaaaggagaaagagaaagaagaacaggaagagagggagaccaagacccctgaatgtccatcccatacccagccgctgggcgtctatctcttgactcccgcagtacaggacttgtggcttagagataaggccacctttacatgtttcgtcgtgggctctgacctgaaggatgcccatttgacttgggaggttgccggaaaggtacccacagggggggttgaggaagggttgctggagcgccattccaatggctctcagagccagcactcaagactcacccttccgagatccctgtggaacgccgggacctctgtcacatgtactctaaatcatcctagcctgcccccacagcgtctgatggcccttagagagccagccgcccaggcaccagttaagcttagcctgaatctgctcgccagtagtgatcccccagaggccgccagctggctcttatgcgaagtgtccggctttagcccgcccaacatcttgctcatgtggctggaggaccagcgagaagtgaacaccagcggcttcgctccagcccggcccccaccccagccgggttctaccacattctgggcctggagtgtcttaagggtcccagcaccacctagcccccagccagccacatacacctgtgttgtgtcccatgaagatagcaggaccctgctaaatgcttctaggagtctggaggtttcctacgtgactgaccatt

SEQ ID NO: 1024 - protein, 10 aa, Artificial Sequence
  source: /note="Description of Artificial Sequence: Synthetic peptide"
GGGGSGGGGS

SEQ ID NO: 1025 - DNA, 30 bp, Artificial Sequence
  source: /note="Description of Artificial Sequence: Synthetic oligonucleotide"
ggtggcggaggttctggaggtggaggttcc

SEQ ID NO: 1026 - protein, 24 aa, Artificial Sequence
  source: /note="Description of Artificial Sequence: Synthetic peptide"
IYIWAPLAGTCGVLLLSLVITLYC

SEQ ID NO: 1027 - DNA, 72 bp, Artificial Sequence
  source: /note="Description of Artificial Sequence: Synthetic oligonucleotide"
atctacatctgggcgcccttggccgggacttgtggggtccttctcctgtcactggttatcaccctttactgc

SEQ ID NO: 1028 - DNA, 72 bp, Artificial Sequence
  source: /note="Description of Artificial Sequence: Synthetic oligonucleotide"
atctacatttgggcccctctggctggtacttgcggggtcctgctgctttcactcgtgatcactctttactgt

SEQ ID NO: 1029 - protein, 42 aa, Artificial Sequence
  source: /note="Description of Artificial Sequence: Synthetic polypeptide"
KRGRKKLLYIFKQPFMRPVQTTQEEDGCSCRFPEEEEGGCEL

SEQ ID NO: 1030 - DNA, 126 bp, Artificial Sequence
  source: /note="Description of Artificial Sequence: Synthetic polynucleotide"
aaacggggcagaaagaaactcctgtatatattcaaacaaccatttatgagaccagtacaaactactcaagaggaagatggctgtagctgccgatttccagaagaagaagaaggaggatgtgaactg

SEQ ID NO: 1031 - DNA, 126 bp, Artificial Sequence
  source: /note="Description of Artificial Sequence: Synthetic polynucleotide"
aagcgcggtcggaagaagctgctgtacatctttaagcaacccttcatgaggcctgtgcagactactcaagaggaggacggctgttcatgccggttcccagaggaggaggaaggcggctgcgaactg

SEQ ID NO: 1032 - protein, 48 aa, Artificial Sequence
  source: /note="Description of Artificial Sequence: Synthetic polypeptide"
QRRKYRSNKGESPVEPAEPCRYSCPREEEGSTIPIQEDYRKPEPACSP

SEQ ID NO: 1033 - DNA, 123 bp, Artificial Sequence
  source: /note="Description of Artificial Sequence: Synthetic polynucleotide"
aggagtaagaggagcaggctcctgcacagtgactacatgaacatgactccccgccgccccgggcccacccgcaagcattaccagccctatgccccaccacgcgacttcgcagcctatcgctcc

SEQ ID NO: 1034 - protein, 112 aa, Artificial Sequence
  source: /note="Description of Artificial Sequence: Synthetic polypeptide"
RVKFSRSADAPAYKQGQNQLYNELNLGRREEYDVLDKRRGRDPEMGGKPRRKNPQEGLYNELQKDKMAEAYSEIGMKGERRRGKGHDGLYQGLSTATKDTYDALHMQALPPR

SEQ ID NO: 1035 - DNA, 336 bp, Artificial Sequence
  source: /note="Description of Artificial Sequence: Synthetic polynucleotide"
agagtgaagttcagcaggagcgcagacgcccccgcgtacaagcagggccagaaccagctctataacgagctcaatctaggacgaagagaggagtacgatgttttggacaagagacgtggccgggaccctgagatggggggaaagccgagaaggaagaaccctcaggaaggcctgtacaatgaactgcagaaagataagatggcggaggcctacagtgagattgggatgaaaggcgagcgccggaggggcaaggggcacgatggcctttaccagggtctcagtacagccaccaaggacacctacgacgcccttcacatgcaggccctgccccctcgc

SEQ ID NO: 1036 - DNA, 336 bp, Artificial Sequence
  source: /note="Description of Artificial Sequence: Synthetic polynucleotide"
cgcgtgaaattcagccgcagcgcagatgctccagcctacaagcaggggcagaaccagctctacaacgaactcaatcttggtcggagagaggagtacgacgtgctggacaagcggagaggacgggacccagaaatgggcgggaagccgcgcagaaagaatccccaagagggcctgtacaacgagctccaaaaggataagatggcagaagcctatagcgagattggtatgaaaggggaacgcagaagaggcaaaggccacgacggactgtaccagggactcagcaccgccaccaaggacacctatgacgctcttcacatgcaggccctgccgcctcgg

SEQ ID NO: 1037 - protein, 112 aa, Artificial Sequence
  source: /note="Description of Artificial Sequence: Synthetic polypeptide"
RVKFSRSADAPAYQQGQNQLYNELNLGRREEYDVLDKRRGRDPEMGGKPRRKNPQEGLYNELQKDKMAEAYSEIGMKGERRRGKGHDGLYQGLSTATKDTYDALHMQALPPR

SEQ ID NO: 1038 - DNA, 336 bp, Artificial Sequence
  source: /note="Description of Artificial Sequence: Synthetic polynucleotide"
agagtgaagttcagcaggagcgcagacgcccccgcgtaccagcagggccagaaccagctctataacgagctcaatctaggacgaagagaggagtacgatgttttggacaagagacgtggccgggaccctgagatggggggaaagccgagaaggaagaaccctcaggaaggcctgtacaatgaactgcagaaagataagatggcggaggcctacagtgagattgggatgaaaggcgagcgccggaggggcaaggggcacgatggcctttaccagggtctcagtacagccaccaaggacacctacgacgcccttcacatgcaggccctgccccctcgc

SEQ ID NO: 1039 - protein, 5 aa, Artificial Sequence
  source: /note="Description of Artificial Sequence: Synthetic peptide"
GGGGS

SEQ ID NO: 1040 - DNA, 30 bp, Artificial Sequence; identical to SEQ ID NO: 1025
  source: /note="Description of Artificial Sequence: Synthetic oligonucleotide"

SEQ ID NO: 1041 - protein, 150 aa, Artificial Sequence [sequence omitted]

SEQ ID NO: 1042 - DNA, 450 bp, Artificial Sequence
  source: /note="Description of Artificial Sequence: Synthetic polynucleotide"
cccggatggtttctggactctccggatcgcccgtggaatcccccaaccttctcaccggcactcttggttgtgactgagggcgataatgcgaccttcacgtgctcgttctccaacacctccgaatcattcgtgctgaactggtaccgcatgagcccgtcaaaccagaccgacaagctcgccgcgtttccggaagatcggtcgcaaccgggacaggattgtcggttccgcgtgactcaactgccgaatggcagagacttccacatgagcgtggtccgcgctaggcgaaacgactccgggacctacctgtgcggagccatctcgctggcgcctaaggcccaaatcaaagagagcttgagggccgaactgagagtgaccgagcgcagagctgaggtgccaactgcacatccatccccatcgcctcggcctgcggggcagtttcagaccctggtc

SEQ ID NO: 1043 - protein, 394 aa, Artificial Sequence
  source: /note="Description of Artificial Sequence: Synthetic polypeptide"
MALPVTALLLPLALLLHAARPPGWFLDSPDRPWNPPTFSPALLVVTEGDNATFTCSFSNTSESFVLNWYRMSPSNQTDKLAAFPEDRSQPGQDCRFRVTQLPNGRDFHMSVVRARRNDSGTYLCGAISLAPKAQIKESLRAELRVTERRAEVPTAHPSPSPRPAGQFQTLVTTTPAPRPPTPAPTIASQPLSLRPEACRPAAGGAVHTRGLDFACDIYIWAPLAGTCGVLLLSLVITLYCKRGRKKLLYIFKQPFMRPVQTTQEEDGCSCRFPEEEEGGCELRVKFSRSADAPAYKQGQNQLYNELNLGRREEYDVLDKRRGRDPEMGGKPRRKNPQEGLYNELQKDKMAEAYSEIGMKGERRRGKGHDGLYQGLSTATKDTYDALHMQALPPR

SEQ ID NO: 1044 - DNA, 1182 bp, Artificial Sequence
  source: /note="Description of Artificial Sequence: Synthetic polynucleotide"
atggccctccctgtcactgccctgcttctccccctcgcactcctgctccacgccgctagaccacccggatggtttctggactctccggatcgcccgtggaatcccccaaccttctcaccggcactcttggttgtgactgagggcgataatgcgaccttcacgtgctcgttctccaacacctccgaatcattcgtgctgaactggtaccgcatgagcccgtcaaaccagaccgacaagctcgccgcgtttccggaagatcggtcgcaaccgggacaggattgtcggttccgcgtgactcaactgccgaatggcagagacttccacatgagcgtggtccgcgctaggcgaaacgactccgggacctacctgtgcggagccatctcgctggcgcctaaggcccaaatcaaagagagcttgagggccgaactgagagtgaccgagcgcagagctgaggtgccaactgcacatccatccccatcgcctcggcctgcggggcagtttcagaccctggtcacgaccactccggcgccgcgcccaccgactccggccccaactatcgcgagccagcccctgtcgctgaggccggaagcatgccgccctgccgccggaggtgctgtgcatacccggggattggacttcgcatgcgacatctacatttgggctcctctcgccggaacttgtggcgtgctccttctgtccctggtcatcaccctgtactgcaagcggggtcggaaaaagcttctgtacattttcaagcagcccttcatgaggcccgtgcaaaccacccaggaggaggacggttgctcctgccggttccccgaagaggaagaaggaggttgcgagctgcgcgtgaagttctcccggagcgccgacgcccccgcctataagcagggccagaaccagctgtacaacgaactgaacctgggacggcgggaagagtacgatgtgctggacaagcggcgcggccgggaccccgaaatgggcgggaagcctagaagaaagaaccctcaggaaggcctgtataacgagctgcagaaggacaagatggccgaggcctactccgaaattgggatgaagggagagcggcggaggggaaaggggcacgacggcctgtaccaaggactgtccaccgccaccaaggacacatacgatgccctgcacatgcaggcccttccccctcgc

SEQ ID NO: 1045 - protein, 17 aa, Artificial Sequence
  source: /note="Description of Artificial Sequence: Synthetic peptide"
ASGGGGSGGRASGGGGS

SEQ ID NO: 1046 - protein, 373 aa, Artificial Sequence
  source: /note="Description of Artificial Sequence: Synthetic polypeptide"
PGWFLDSPDRPWNPPTFSPALLVVTEGDNATFTCSFSNTSESFVLNWYRMSPSNQTDKLAAFPEDRSQPGQDCRFRVTQLPNGRDFHMSVVRARRNDSGTYLCGAISLAPKAQIKESLRAELRVTERRAEVPTAHPSPSPRPAGQFQTLVTTTPAPRPPTPAPTIASQPLSLRPEACRPAAGGAVHTRGLDFACDIYIWAPLAGTCGVLLLSLVITLYCKRGRKKLLYIFKQPFMRPVQTTQEEDGCSCRFPEEEEGGCELRVKFSRSADAPAYKQGQNQLYNELNLGRREEYDVLDKRRGRDPEMGGKPRRKNPQEGLYNELQKDKMAEAYSEIGMKGERRRGKGHDGLYQGLSTATKDTYDALHMQALPPR

SEQ ID NO: 1047 - protein, 35 aa, Artificial Sequence
  source: /note="Description of Artificial Sequence: Synthetic polypeptide"
TKKKYSSSVHDPNGEYMFMRAVNTAKKSRLTDVTL

SEQ ID NO: 1048 - DNA, 105 bp, Artificial Sequence
  source: /note="Description of Artificial Sequence: Synthetic polynucleotide"
acaaaaaagaagtattcatccagtgtgcacgaccctaacggtgaatacatgttcatgagagcagtgaacacagccaaaaaatccagactcacagatgtgacccta

SEQ ID NO: 1049 - protein, 69 aa, Artificial Sequence
  source: /note="Description of Artificial Sequence: Synthetic polypeptide"
TTTPAPRPPTPAPTIASQPLSLRPEACRPAAGGAVHTRGLDFACDFWLPIGCAAFVVVCILGCILICWL

SEQ ID NO: 1050 - DNA, 207 bp, Artificial Sequence
  source: /note="Description of Artificial Sequence: Synthetic polynucleotide"
accacgacgccagcgccgcgaccaccaacaccggcgcccaccatcgcgtcgcagcccctgtccctgcgcccagaggcgtgccggccagcggcggggggcgcagtgcacacgagggggctggacttcgcctgtgatttctggttacccataggatgtgcagcctttgttgtagtctgcattttgggatgcatacttatttgttggctt

SEQ ID NO: 1051 - protein, 41 aa, Artificial Sequence
  source: /note="Description of Artificial Sequence: Synthetic polypeptide"
RSKRSRLLHSDYMNMTPRRPGPTRKHYQPYAPPRDFAAYRS

SEQ ID NO: 1052 - DNA, 123 bp, Artificial Sequence; identical to SEQ ID NO: 1033
  source: /note="Description of Artificial Sequence: Synthetic polynucleotide"

SEQ ID NO: 1053 - protein, 486 aa, Artificial Sequence
  source: /note="Description of Artificial Sequence: Synthetic polypeptide"
  SITE (1)..(21): /note="This region may or may not be present"
  source: /note="See specification as filed for detailed description of substitutions and preferred embodiments"
MALPVTALLLPLALLLHAARPDIQMTQTTSSLSASLGDRVTISCRASQDISKYLNWYQQKPDGTVKLLIYHTSRLHSGVPSRFSGSGSGTDYSLTISNLEQEDIATYFCQQGNTLPYTFGGGTKLEITGGGGSGGGGSGGGGSEVKLQESGPGLVAPSQSLSVTCTVSGVSLPDYGVSWIRQPPRKGLEWLGVIWGSETTYYNSALKSRLTIIKDNSKSQVFLKMNSLQTDDTAIYYCAKHYYYGGSYAMDYWGQGTSVTVSSTTTPAPRPPTPAPTIASQPLSLRPEACRPAAGGAVHTRGLDFACDIYIWAPLAGTCGVLLLSLVITLYCKRGRKKLLYIFKQPFMRPVQTTQEEDGCSCRFPEEEEGGCELRVKFSRSADAPAYKQGQNQLYNELNLGRREEYDVLDKRRGRDPEMGGKPRRKNPQEGLYNELQKDKMAEAYSEIGMKGERRRGKGHDGLYQGLSTATKDTYDALHMQALPPR

SEQ ID NO: 1054 - protein, 465 aa, Artificial Sequence; identical to SEQ ID NO: 26
  source: /note="Description of Artificial Sequence: Synthetic polypeptide"

SEQ ID NO: 1055 - protein, 486 aa, Artificial Sequence; identical to SEQ ID NO: 1053
  source: /note="Description of Artificial Sequence: Synthetic polypeptide"

SEQ ID NO: 1056 - DNA, 1458 bp, Artificial Sequence
  source: /note="Description of Artificial Sequence: Synthetic polynucleotide"
atggccttaccagtgaccgccttgctcctgccgctggccttgctgctccacgccgccaggccggacatccagatgacacagactacatcctccctgtctgcctctctgggagacagagtcaccatcagttgcagggcaagtcaggacattagtaaatatttaaattggtatcagcagaaaccagatggaactgttaaactcctgatctaccatacatcaagattacactcaggagtcccatcaaggttcagtggcagtgggtctggaacagattattctctcaccattagcaacctggagcaagaagatattgccacttacttttgccaacagggtaatacgcttccgtacacgttcggaggggggaccaagctggagatcacaggtggcggtggctcgggcggtggtgggtcgggtggcggcggatctgaggtgaaactgcaggagtcaggacctggcctggtggcgccctcacagagcctgtccgtcacatgcactgtctcaggggtctcattacccgactatggtgtaagctggattcgccagcctccacgaaagggtctggagtggctgggagtaatatggggtagtgaaaccacatactataattcagctctcaaatccagactgaccatcatcaaggacaactccaagagccaagttttcttaaaaatgaacagtctgcaaactgatgacacagccatttactactgtgccaaacattattactacggtggtagctatgctatggactactggggccaaggaacctcagtcaccgtctcctcaaccacgacgccagcgccgcgaccaccaacaccggcgcccaccatcgcgtcgcagcccctgtccctgcgcccagaggcgtgccggccagcggcggggggcgcagtgcacacgagggggctggacttcgcctgtgatatctacatctgggcgcccttggccgggacttgtggggtccttctcctgtcactggttatcaccctttactgcaaacggggcagaaagaaactcctgtatatattcaaacaaccatttatgagaccagtacaaactactcaagaggaagatggctgtagctgccgatttccagaagaagaagaaggaggatgtgaactgagagtgaagttcagcaggagcgcagacgcccccgcgtacaagcagggccagaaccagctctataacgagctcaatctaggacgaagagaggagtacgatgttttggacaagagacgtggccgggaccctgagatggggggaaagccgagaaggaagaaccctcaggaaggcctgtacaatgaactgcagaaagataagatggcggaggcctacagtgagattgggatgaaaggcgagcgccggaggggcaaggggcacgatggcctttaccagggtctcagtacagccaccaaggacacctacgacgcccttcacatgcaggccctgccccctcgc

SEQ ID NO: 1057 - protein, 242 aa, Artificial Sequence; identical to SEQ ID NO: 15
  source: /note="Description of Artificial Sequence: Synthetic polypeptide"

SEQ ID NO: 1058 - protein, 244 aa, Artificial Sequence
  source: /note="Description of Artificial Sequence: Synthetic polypeptide"
QVQLLESGAELVRPGSSVKISCKASGYAFSSYWMNWVKQRPGQGLEWIGQIYPGDGDTNYNGKFKGQATLTADKSSSTAYMQLSGLTSEDSAVYSCARKTISSVVDFYFDYWGQGTTVTGGGSGGGSGGGSGGGSELVLTQSPKFMSTSVGDRVSVTCKASQNVGTNVAWYQQKPGQSPKPLIYSATYRNSGVPDRFTGSGSGTDFTLTITNVQSKDLADYFCQYNRYPYTSFFFTKLEIKRRS

SEQ ID NO: 1059 - protein, 464 aa, Artificial Sequence
  source: /note="Description of Artificial Sequence: Synthetic polypeptide"
QVQLLESGAELVRPGSSVKISCKASGYAFSSYWMNWVKQRPGQGLEWIGQIYPGDGDTNYNGKFKGQATLTADKSSSTAYMQLSGLTSEDSAVYSCARKTISSVVDFYFDYWGQGTTVTGGGSGGGSGGGSGGGSELVLTQSPKFMSTSVGDRVSVTCKASQNVGTNVAWYQQKPGQSPKPLIYSATYRNSGVPDRFTGSGSGTDFTLTITNVQSKDLADYFCQYNRYPYTSFFFTKLEIKRRSKIEVMYPPPYLDNEKSNGTIIHVKGKHLCPSPLFPGPSKPFWVLVVVGGVLACYSLLVTVAFIIFWVRSKRSRLLHSDYMNMTPRRPGPTRKHYQPYAPPRDFAAYRSRVKFSRSADAPAYQQGQNQLYNELNLGRREEYDVLDKRRGRDPEMGGKPRRKNPQEGLYNELQKDKMAEAYSEIGMKGERRRGKGHDGLYQGLSTATKDTYDALHMQALPPR

SEQ ID NO: 1060 - protein, 246 aa, Artificial Sequence
  source: /note="Description of Artificial Sequence: Synthetic polypeptide"
DIQMTQTTSSLSASLGDRVTISCRASQDISKYLNWYQQKPDGTVKLLIYHTSRLHSGVPSRFSGSGSGTDYSLTISNLEQEDIATYFCQQGNTLPYTFGGGTKLEITGSTSGSGKPGSGEGSTKGEVKLQESGPGLVAPSQSLSVTCTVSGVSLPDYGVSWIRQPPRKGLEWLGVIWGSETTYYNSALKSRLTIIKDNSKSQVFLKMNSLQTDDTAIYYCAKHYYYGGSYAMDYWGQGTSVTVSSE

SEQ ID NO: 1061 - protein, 439 aa, Artificial Sequence
  source: /note="Description of Artificial Sequence: Synthetic polypeptide"
DIQMTQTTSSLSASLGDRVTISCRASQDISKYLNWYQQKPDGTVKLLIYHTSRLHSGVPSRFSGSGSGTDYSLTISNLEQEDIATYFCQQGNTLPYTFGGGTKLEITGSTSGSGKPGSGEGSTKGEVKLQESGPGLVAPSQSLSVTCTVSGVSLPDYGVSWIRQPPRKGLEWLGVIWGSETTYYNSALKSRLTIIKDNSKSQVFLKMNSLQTDDTAIYYCAKHYYYGGSYAMDYWGQGTSVTVSSESKYGPPCPPCPMFWVLVVVGGVLACYSLLVTVAFIIFWVKRGRKKLLYIFKQPFMRPVQTTQEEDGCSCRFEEEEGGCELRVKFSRSADAPAYQQGQNQLYNELNLGRREEYDVLDKRRGRDPEMGGKPRRKNPQEGLYNELQKDKMAEAYSEIGMKGERRRGKGHDGLYQGLSTATKDTYDALHMQALPPRL

SEQ ID NO: 1062 - protein, 819 aa, Artificial Sequence
  source: /note="Description of Artificial Sequence: Synthetic polypeptide"
DIQMTQTTSSLSASLGDRVTISCRASQDISKYLNWYQQKPDGTVKLLIYHTSRLHSGVPSRFSGSGSGTDYSLTISNLEQEDIATYFCQQGNTLPYTFGGGTKLEITGSTSGSGKPGSGEGSTKGEVKLQESGPGLVAPSQSLSVTCTVSGVSLPDYGVSWIRQPPRKGLEWLGVIWGSETTYYNSALKSRLTIIKDNSKSQVFLKMNSLQTDDTAIYYCAKHYYYGGSYAMDYWGQGTSVTVSSESKYGPPCPPCPMFWVLVVVGGVLACYSLLVTVAFIIFWVKRGRKKLLYIFKQPFMRPVQTTQEEDGCSCRFEEEEGGCELRVKFSRSADAPAYQQGQNQLYNELNLGRREEYDVLDKRRGRDPEMGGKPRRKNPQEGLYNELQKDKMAEAYSEIGMKGERRRGKGHDGLYQGLSTATKDTYDALHMQALPPRLEGGGEGRGSLLTCGDVEENPGPRMLLLVTSLLLCELPHPAFLLIPRKVCNGIGIGEFKDSLSINATNIKHFKNCTSISGDLHILPVAFRGDSFTHTPPLDPQELDILKTVKEITGFLLIQAWPENRTDLHAFENLEIIRGRTKQHGQFSLAVVSLNITSLGLRSLKEISDGDVIISGNKNLCYANTINWKKLFGTSGQKTKIISNRGENSCKATGQVCHALCSPEGCWGPEPRDCVSCRNVSRGRECVDKCNLLEGEPREFVENSECIQCHPECLPQAMNITCTGRGPDNCIQCAHYIDGPHCVKTCPAGVMGENNTLVWKYADAGHVCHLCHPNCTYGCTGPGLEGCPTNGPKIPSIATGMVGALLLLLVVALGIGLFM

SEQ ID NO: 1063 - protein, 245 aa, Artificial Sequence
  source: /note="Description of Artificial Sequence: Synthetic polypeptide"
DIQMTQTTSSLSASLGDRVTISCRASQDISKYLNWYQQKPDGTVKLLIYHTSRLHSGVPSRFSGSGSGTDYSLTISNLEQEDIATYFCQQGNTLPYTFGGGTKLEITGSTSGSGKPGSGEGSTKGEVKLQESGPGLVAPSQSLSVTCTVSGVSLPDYGVSWIRQPPRKGLEWLGVIWGSETTYYNSALKSRLTIIKDNSKSQVFLKMNSLQTDDTAIYYCAKHYYYGGSYAMDYWGQGTSVTVSS

SEQ ID NO: 1064 - protein, 467 aa, Artificial Sequence
  source: /note="Description of Artificial Sequence: Synthetic polypeptide"
DIQMTQTTSSLSASLGDRVTISCRASQDISKYLNWYQQKPDGTVKLLIYHTSRLHSGVPSRFSGSGSGTDYSLTISNLEQEDIATYFCQQGNTLPYTFGGGTKLEITGSTSGSGKPGSGEGSTKGEVKLQESGPGLVAPSQSLSVTCTVSGVSLPDYGVSWIRQPPRKGLEWLGVIWGSETTYYNSALKSRLTIIKDNSKSQVFLKMNSLQTDDTAIYYCAKHYYYGGSYAMDYWGQGTSVTVSSAAAIEVMYPPPYLDNEKSNGTIIHVKGKHLCPSPLFPGPSKPFWVLVVVGGVLACYSLLVTVAFIIFWVRSKRSRLLHSDYMNMTPRRPGPTRKHYQPYAPPRDFAAYRSRVKFSRSADAPAYQQGQNQLYNELNLGRREEYDVLDKRRGRDPEMGGKPRRKNPQEGLYNELQKDKMAEAYSEIGMKGERRRGKGHDGLYQGLSTATKDTYDALHMQALPPR

SEQ ID NO: 1065 - protein, 119 aa, Artificial Sequence
  source: /note="Description of Artificial Sequence: Synthetic polypeptide"
QVQLLESGAELVRPGSSVKISCKASGYAFSSYWMNWVKQRPGQGLEWIGQIYPGDGDTNYNGKFKGQATLTADKSSSTAYMQLSGLTSEDSAVYSCARKTISSVVDFYFDYWGQGTTVT

SEQ ID NO: 1066 - protein, 111 aa, Artificial Sequence
  source: /note="Description of Artificial Sequence: Synthetic polypeptide"
ELVLTQSPKFMSTSVGDRVSVTCKASQNVGTNVAWYQQKPGQSPKPLIYSATYRNSGVPDRFTGSGSGTDFTLTITNVQSKDLADYFYFCQYNRYPYTSGGGTKLEIKRRS

SEQ ID NO: 1067 - protein, 242 aa, Artificial Sequence
  source: /note="Description of Artificial Sequence: Synthetic polypeptide"
EIVMTQSPATLSLSPGERATLSCRASQDISKYLNWYQQKPGQAPRLLIYHTSRLHSGIPARFSGSGSGTDYTLTISSLQPEDFAVYFCQQGNTLPYTFGQGTKLEIKGGGGSGGGGSGGGGSQVQLQESGPGLVKPSETLSLTCTVSGVSLPDYGVSWIRQPPGKGLEWIGVIWGSETTYYSSSLKSRVTISKDNSKNQVSLKLSSVTAADTAVYYCAKHYYYGGSYAMDYWGQGTLVTVSS

SEQ ID NO: 1068 - protein, 486 aa, Artificial Sequence
  source: /note="Description of Artificial Sequence: Synthetic polypeptide"
MALPVTALLLPLALLLHAARPEIVMTQSPATLSLSPGERATLSCRASQDISKYLNWYQQKPGQAPRLLIYHTSRLHSGIPARFSGSGSGTDYTLTISSLQPEDFAVYFCQQGNTLPYTFGQGTKLEIKGGGGSGGGGSGGGGSQVQLQESGPGLVKPSETLSLTCTVSGVSLPDYGVSWIRQPPGKGLEWIGVIWGSETTYYSSSLKSRVTISKDNSKNQVSLKLSSVTAADTAVYYCAKHYYYGGSYAMDYWGQGTLVTVSSTTTPAPRPPTPAPTIASQPLSLRPEACRPAAGGAVHTRGLDFACDIYIWAPLAGTCGVLLLSLVITLYCKRGRKKLLYIFKQPFMRPVQTTQEEDGCSCRFPEEEEGGCELRVKFSRSADAPAYKQGQNQLYNELNLGRREEYDVLDKRRGRDPEMGGKPRRKNPQEGLYNELQKDKMAEAYSEIGMKGERRRGKGHDGLYQGLSTATKDTYDALHMQALPPR

SEQ ID NO: 1069 - protein, 242 aa, Artificial Sequence
  source: /note="Description of Artificial Sequence: Synthetic polypeptide"
EIVMTQSPATLSLSPGERATLSCRASQDISKYLNWYQQKPGQAPRLLIYHTSRLHSGIPARFSGSGSGTDYTLTISSLQPEDFAVYFCQQGNTLPYTFGQGTKLEIKGGGGSGGGGSGGGGSQVQLQESGPGLVKPSETLSLTCTVSGVSLPDYGVSWIRQPPGKGLEWIGVIWGSETTYYQSSLKSRVTISKDNSKNQVSLKLSSVTAADTAVYYCAKHYYYGGSYAMDYWGQGTLVTVSS

SEQ ID NO: 1070 - DNA, 813 bp, Artificial Sequence
  source: /note="Description of Artificial Sequence: Synthetic polynucleotide"
atggccctccctgtcaccgccctgctgcttccgctggctcttctgctccacgccgctcggcccgaaattgtgatgacccagtcacccgccactcttagcctttcacccggtgagcgcgcaaccctgtcttgcagagcctcccaagacatctcaaaataccttaattggtatcaacagaagcccggacaggctcctcgccttctgatctaccacaccagccggctccattctggaatccctgccaggttcagcggtagcggatctgggaccgactacaccctcactatcagctcactgcagccagaggacttcgctgtctatttctgtcagcaagggaacaccctgccctacacctttggacagggcaccaagctcgagattaaaggtggaggtggcagcggaggaggtgggtccggcggtggaggaagccaggtccaactccaagaaagcggaccgggtcttgtgaagccatcagaaactctttcactgacttgtactgtgagcggagtgtctctccccgattacggggtgtcttggatcagacagccaccggggaagggtctggaatggattggagtgatttggggctctgagactacttactaccaatcatccctcaagtcacgcgtcaccatctcaaaggacaactctaagaatcaggtgtcactgaaactgtcatctgtgaccgcagccgacaccgccgtgtactattgcgctaagcattactattatggcgggagctacgcaatggattactggggacagggtactctggtcaccgtgtccagccaccaccatcatcaccatcaccat

SEQ ID NO: 1071 - protein, 486 aa, Artificial Sequence
  source: /note="Description of Artificial Sequence: Synthetic polypeptide"
MALPVTALLLPLALLLHAARPEIVMTQSPATLSLSPGERATLSCRASQDISKYLNWYQQKPGQAPRLLIYHTSRLHSGIPARFSGSGSGTDYTLTISSLQPEDFAVYFCQQGNTLPYTFGQGTKLEIKGGGGSGGGGSGGGGSQVQLQESGPGLVKPSETLSLTCTVSGVSLPDYGVSWIRQPPGKGLEWIGVIWGSETTYYQSSLKSRVTISKDNSKNQVSLKLSSVTAADTAVYYCAKHYYYGGSYAMDYWGQGTLVTVSSTTTPAPRPPTPAPTIASQPLSLRPEACRPAAGGAVHTRGLDFACDIYIWAPLAGTCGVLLLSLVITLYCKRGRKKLLYIFKQPFMRPVQTTQEEDGCSCRFPEEEEGGCELRVKFSRSADAPAYKQGQNQLYNELNLGRREEYDVLDKRRGRDPEMGGKPRRKNPQEGLYNELQKDKMAEAYSEIGMKGERRRGKGHDGLYQGLSTATKDTYDALHMQALPPR

SEQ ID NO: 1072 - DNA, 1458 bp, Artificial Sequence
  source: /note="Description of Artificial Sequence: Synthetic polynucleotide"
atggccctccctgtcaccgccctgctgcttccgctggctcttctgctccacgccgctcggcccgaaattgtgatgacccagtcacccgccactcttagcctttcacccggtgagcgcgcaaccctgtcttgcagagcctcccaagacatctcaaaataccttaattggtatcaacagaagcccggacaggctcctcgccttctgatctaccacaccagccggctccattctggaatccctgccaggttcagcggtagcggatctgggaccgactacaccctcactatcagctcactgcagccagaggacttcgctgtctatttctgtcagcaagggaacaccctgccctacacctttggacagggcaccaagctcgagattaaaggtggaggtggcagcggaggaggtgggtccggcggtggaggaagccaggtccaactccaagaaagcggaccgggtcttgtgaagccatcagaaactctttcactgacttgtactgtgagcggagtgtctctccccgattacggggtgtcttggatcagacagccaccggggaagggtctggaatggattggagtgatttggggctctgagactacttactaccaatcatccctcaagtcacgcgtcaccatctcaaaggacaactctaagaatcaggtgtcactgaaactgtcatctgtgaccgcagccgacaccgccgtgtactattgcgctaagcattactattatggcgggagctacgcaatggattactggggacagggtactctggtcaccgtgtccagcaccactaccccagcaccgaggccacccaccccggctcctaccatcgcctcccagcctctgtccctgcgtccggaggcatgtagacccgcagctggtggggccgtgcatacccggggtcttgacttcgcctgcgatatctacatttgggcccctctggctggtacttgcggggtcctgctgctttcactcgtgatcactctttactgtaagcgcggtcggaagaagctgctgtacatctttaagcaacccttcatgaggcctgtgcagactactcaagaggaggacggctgttcatgccggttcccagaggaggaggaaggcggctgcgaactgcgcgtgaaattcagccgcagcgcagatgctccagcctacaagcaggggcagaaccagctctacaacgaactcaatcttggtcggagagaggagtacgacgtgctggacaagcggagaggacgggacccagaaatgggcgggaagccgcgcagaaagaatccccaagagggcctgtacaacgagctccaaaaggataagatggcagaagcctatagcgagattggtatgaaaggggaacgcagaagaggcaaaggccacgacggactgtaccagggactcagcaccgccaccaaggacacctatgacgctcttcacatgcaggccctgccgcctcgg

SEQ ID NO: 1073 - protein, 271 aa, Artificial Sequence
  source: /note="Description of Artificial Sequence: Synthetic polypeptide"
MALPVTALLLPLALLLHAARPEIVMTQSPATLSLSPGERATLSCRASQDISKYLNWYQQKPGQAPRLLIYHTSRLHSGIPARFSGSGSGTDYTLTISSLQPEDFAVYFCQQGNTLPYTFGQGTKLEIKGGGGSGGGGSGGGGSQVQLQESGPGLVKPSETLSLTCTVSGVSLPDYGVSWIRQPPGKGLEWIGVIWGSETTYYQSSLKSRVTISKDNSKNQVSLKLSSVTAADTAVYYCAKHYYYGGSYAMDYWGQGTLVTVSSHHHHHHHH

SEQ ID NO: 1074 - protein, 242 aa, Artificial Sequence
  source: /note="Description of Artificial Sequence: Synthetic polypeptide"
QVQLQESGPGLVKPSETLSLTCTVSGVSLPDYGVSWIRQPPGKGLEWIGVIWGSETTYYSSSLKSRVTISKDNSKNQVSLKLSSVTAADTAVYYCAKHYYYGGSYAMDYWGQGTLVTVSSGGGGSGGGGSGGGGSEIVMTQSPATLSLSPGERATLSCRASQDISKYLNWYQQKPGQAPRLLIYHTSRLHSGIPARFSGSGSGTDYTLTISSLQPEDFAVYFCQQGNTLPYTFGQGTKLEIK

SEQ ID NO: 1075 - protein, 486 aa, Artificial Sequence
  source: /note="Description of Artificial Sequence: Synthetic polypeptide"
MALPVTALLLPLALLLHAARPQVQLQESGPGLVKPSETLSLTCTVSGVSLPDYGVSWIRQPPGKGLEWIGVIWGSETTYYSSSLKSRVTISKDNSKNQVSLKLSSVTAADTAVYYCAKHYYYGGSYAMDYWGQGTLVTVSSGGGGSGGGGSGGGGSEIVMTQSPATLSLSPGERATLSCRASQDISKYLNWYQQKPGQAPRLLIYHTSRLHSGIPARFSGSGSGTDYTLTISSLQPEDFAVYFCQQGNTLPYTFGQGTKLEIKTTTPAPRPPTPAPTIASQPLSLRPEACRPAAGGAVHTRGLDFACDIYIWAPLAGTCGVLLLSLVITLYCKRGRKKLLYIFKQPFMRPVQTTQEEDGCSCRFPEEEEGGCELRVKFSRSADAPAYKQGQNQLYNELNLGRREEYDVLDKRRGRDPEMGGKPRRKNPQEGLYNELQKDKMAEAYSEIGMKGERRRGKGHDGLYQGLSTATKDTYDALHMQALPPR

SEQ ID NO: 1076 - protein, 242 aa, Artificial Sequence
  source: /note="Description of Artificial Sequence: Synthetic polypeptide"
QVQLQESGPGLVKPSETLSLTCTVSGVSLPDYGVSWIRQPPGKGLEWIGVIWGSETTYYQSSLKSRVTISKDNSKNQVSLKLSSVTAADTAVYYCAKHYYYGGSYAMDYWGQGTLVTVSSGGGGSGGGGSGGGGSEIVMTQSPATLSLSPGERATLSCRASQDISKYLNWYQQKPGQAPRLLIYHTSRLHSGIPARFSGSGSGTDYTLTISSLQPEDFAVYFCQQGNTLPYTFGQGTKLEIK

SEQ ID NO: 1077 - protein, 486 aa, Artificial Sequence
  source: /note="Description of Artificial Sequence: Synthetic polypeptide"
MALPVTALLLPLALLLHAARPQVQLQESGPGLVKPSETLSLTCTVSGVSLPDYGVSWIRQPPGKGLEWIGVIWGSETTYYQSSLKSRVTISKDNSKNQVSLKLSSVTAADTAVYYCAKHYYYGGSYAMDYWGQGTLVTVSSGGGGSGGGGSGGGGSEIVMTQSPATLSLSPGERATLSCRASQDISKYLNWYQQKPGQAPRLLIYHTSRLHSGIPARFSGSGSGTDYTLTISSLQPEDFAVYFCQQGNTLPYTFGQGTKLEIKTTTPAPRPPTPAPTIASQPLSLRPEACRPAAGGAVHTRGLDFACDIYIWAPLAGTCGVLLLSLVITLYCKRGRKKLLYIFKQPFMRPVQTTQEEDGCSCRFPEEEEGGCELRVKFSRSADAPAYKQGQNQLYNELNLGRREEYDVLDKRRGRDPEMGGKPRRKNPQEGLYNELQKDKMAEAYSEIGMKGERRRGKGHDGLYQGLSTATKDTYDALHMQALPPR

SEQ ID NO: 1078 - protein, 247 aa, Artificial Sequence
  source: /note="Description of Artificial Sequence: Synthetic polypeptide"
EIVMTQSPATLSLSPGERATLSCRASQDISKYLNWYQQKPGQAPRLLIYHTSRLHSGIPARFSGSGSGTDYTLTISSLQPEDFAVYFCQQGNTLPYTFGQGTKLEIKGGGGSGGGGSGGGGSGGGGSQVQLQESGPGLVKPSETLSLTCTVSGVSLPDYGVSWIRQPPGKGLEWIGVIWGSETTYYSSSLKSRVTISKDNSKNQVSLKLSSVTAADTAVYYCAKHYYYGGSYAMDYWGQGTLVTVSS

SEQ ID NO: 1079 - protein, 491 aa, Artificial Sequence
  source: /note="Description of Artificial Sequence: Synthetic polypeptide"
MALPVTALLLPLALLLHAARPEIVMTQSPATLSLSPGERATLSCRASQDISKYLNWYQQKPGQAPRLLIYHTSRLHSGIPARFSGSGSGTDYTLTISSLQPEDFAVYFCQQGNTLPYTFGQGTKLEIKGGGGSGGGGSGGGGSGGGGSQVQLQESGPGLVKPSETLSLTCTVSGVSLPDYGVSWIRQPPGKGLEWIGVIWGSETTYYSSSLKSRVTISKDNSKNQVSLKLSSVTAADTAVYYCAKHYYYGGSYAMDYWGQGTLVTVSSTTTPAPRPPTPAPTIASQPLSLRPEACRPAAGGAVHTRGLDFACDIYIWAPLAGTCGVLLLSLVITLYCKRGRKKLLYIFKQPFMRPVQTTQEEDGCSCRFPEEEEGGCELRVKFSRSADAPAYKQGQNQLYNELNLGRREEYDVLDKRRGRDPEMGGKPRRKNPQEGLYNELQKDKMAEAYSEIGMKGERRRGKGHDGLYQGLSTATKDTYDALHMQALPPR

SEQ ID NO: 1080 - protein, 247 aa, Artificial Sequence
  source: /note="Description of Artificial Sequence: Synthetic polypeptide"
EIVMTQSPATLSLSPGERATLSCRASQDISKYLNWYQQKPGQAPRLLIYHTSRLHSGIPARFSGSGSGTDYTLTISSLQPEDFAVYFCQQGNTLPYTFGQGTKLEIKGGGGSGGGGSGGGGSGGGGSQVQLQESGPGLVKPSETLSLTCTVSGVSLPDYGVSWIRQPPGKGLEWIGVIWGSETTYYQSSLKSRVTISKDNSKNQVSLKLSSVTAADTAVYYCAKHYYYGGSYAMDYWGQGTLVTVSS

SEQ ID NO: 1081 - protein, 491 aa, Artificial Sequence
  source: /note="Description of Artificial Sequence: Synthetic polypeptide"
MALPVTALLLPLALLLHAARPEIVMTQSPATLSLSPGERATLSCRASQDISKYLNWYQQKPGQAPRLLIYHTSRLHSGIPARFSGSGSGTDYTLTISSLQPEDFAVYFCQQGNTLPYTFGQGTKLEIKGGGGSGGGGSGGGGSGGGGSQVQLQESGPGLVKPSETLSLTCTVSGVSLPDYGVSWIRQPPGKGLEWIGVIWGSETTYYQSSLKSRVTISKDNSKNQVSLKLSSVTAADTAVYYCAKHYYYGGSYAMDYWGQGTLVTVSSTTTPAPRPPTPAPTIASQPLSLRPEACRPAAGGAVHTRGLDFACDIYIWAPLAGTCGVLLLSLVITLYCKRGRKKLLYIFKQPFMRPVQTTQEEDGCSCRFPEEEEGGCELRVKFSRSADAPAYKQGQNQLYNELNLGRREEYDVLDKRRGRDPEMGGKPRRKNPQEGLYNELQKDKMAEAYSEIGMKGERRRGKGHDGLYQGLSTATKDTYDALHMQALPPR

SEQ ID NO: 1082 - protein, 247 aa, Artificial Sequence
  source: /note="Description of Artificial Sequence: Synthetic polypeptide"
QVQLQESGPGLVKPSETLSLTCTVSGVSLPDYGVSWIRQPPGKGLEWIGVIWGSETTYYSSSLKSRVTISKDNSKNQVSLKLSSVTAADTAVYYCAKHYYYGGSYAMDYWGQGTLVTVSSGGGGSGGGGSGGGGSGGGGSEIVMTQSPATLSLSPGERATLSCRASQDISKYLNWYQQKPGQAPRLLIYHTSRLHSGIPARFSGSGSGTDYTLTISSLQPEDFAVYFCQQGNTLPYTFGQGTKLEIK

SEQ ID NO: 1083 - protein, 491 aa, Artificial Sequence
  source: /note="Description of Artificial Sequence: Synthetic polypeptide"
MALPVTALLLPLALLLHAARPQVQLQESGPGLVKPSETLSLTCTVSGVSLPDYGVSWIRQPPGKGLEWIGVIWGSETTYYSSSLKSRVTISKDNSKNQVSLKLSSVTAADTAVYYCAKHYYYGGSYAMDYWGQGTLVTVSSGGGGSGGGGSGGGGSGGGGSEIVMTQSPATLSLSPGERATLSCRASQDISKYLNWYQQKPGQAPRLLIYHTSRLHSGIPARFSGSGSGTDYTLTISSLQPEDFAVYFCQQGNTLPYTFGQGTKLEIKTTTPAPRPPTPAPTIASQPLSLRPEACRPAAGGAVHTRGLDFACDIYIWAPLAGTCGVLLLSLVITLYCKRGRKKLLYIFKQPFMRPVQTTQEEDGCSCRFPEEEEGGCELRVKFSRSADAPAYKQGQNQLYNELNLGRREEYDVLDKRRGRDPEMGGKPRRKNPQEGLYNELQKDKMAEAYSEIGMKGERRRGKGHDGLYQGLSTATKDTYDALHMQALPPR

SEQ ID NO: 1084 - protein, 247 aa, Artificial Sequence
  source: /note="Description of Artificial Sequence: Synthetic polypeptide"
QVQLQESGPGLVKPSETLSLTCTVSGVSLPDYGVSWIRQPPGKGLEWIGVIWGSETTYYQSSLKSRVTISKDNSKNQVSLKLSSVTAADTAVYYCAKHYYYGGSYAMDYWGQGTLVTVSSGGGGSGGGGSGGGGSGGGGSEIVMTQSPATLSLSPGERATLSCRASQDISKYLNWYQQKPGQAPRLLIYHTSRLHSGIPARFSGSGSGTDYTLTISSLQPEDFAVYFCQQGNTLPYTFGQGTKLEIK

SEQ ID NO: 1085 - protein, 491 aa, Artificial Sequence
  source: /note="Description of Artificial Sequence: Synthetic polypeptide"
MALPVTALLLPLALLLHAARPQVQLQESGPGLVKPSETLSLTCTVSGVSLPDYGVSWIRQPPGKGLEWIGVIWGSETTYYQSSLKSRVTISKDNSKNQVSLKLSSVTAADTAVYYCAKHYYYGGSYAMDYWGQGTLVTVSSGGGGSGGGGSGGGGSGGGGSEIVMTQSPATLSLSPGERATLSCRASQDISKYLNWYQQKPGQAPRLLIYHTSRLHSGIPARFSGSGSGTDYTLTISSLQPEDFAVYFCQQGNTLPYTFGQGTKLEIKTTTPAPRPPTPAPTIASQPLSLRPEACRPAAGGAVHTRGLDFACDIYIWAPLAGTCGVLLLSLVITLYCKRGRKKLLYIFKQPFMRPVQTTQEEDGCSCRFPEEEEGGCELRVKFSRSADAPAYKQGQNQLYNELNLGRREEYDVLDKRRGRDPEMGGKPRRKNPQEGLYNELQKDKMAEAYSEIGMKGERRRGKGHDGLYQGLSTATKDTYDALHMQALPPR

SEQ ID NO: 1086 - protein, 247 aa, Artificial Sequence
  source: /note="Description of Artificial Sequence: Synthetic polypeptide"
EIVMTQSPATLSLSPGERATLSCRASQDISKYLNWYQQKPGQAPRLLIYHTSRLHSGIPARFSGSGSGTDYTLTISSLQPEDFAVYFCQQGNTLPYTFGQGTKLEIKGGGGSGGGGSGGGGSGGGGSQVQLQESGPGLVKPSETLSLTCTVSGVSLPDYGVSWIRQPPGKGLEWIGVIWGSETTYYNSSLKSRVTISKDNSKNQVSLKLSSVTAADTAVYYCAKHYYYGGSYAMDYWGQGTLVTVSS

SEQ ID NO: 1087 - protein, 491 aa, Artificial Sequence
  source: /note="Description of Artificial Sequence: Synthetic polypeptide"
MALPVTALLLPLALLLHAARPEIVMTQSPATLSLSPGERATLSCRASQDISKYLNWYQQKPGQAPRLLIYHTSRLHSGIPARFSGSGSGTDYTLTISSLQPEDFAVYFCQQGNTLPYTFGQGTKLEIKGGGGSGGGGSGGGGSGGGGSQVQLQESGPGLVKPSETLSLTCTVSGVSLPDYGVSWIRQPPGKGLEWIGVIWGSETTYYNSSLKSRVTISKDNSKNQVSLKLSSVTAADTAVYYCAKHYYYGGSYAMDYWGQGTLVTVSSTTTPAPRPPTPAPTIASQPLSLRPEACRPAAGGAVHTRGLDFACDIYIWAPLAGTCGVLLLSLVITLYCKRGRKKLLYIFKQPFMRPVQTTQEEDGCSCRFPEEEEGGCELRVKFSRSADAPAYKQGQNQLYNELNLGRREEYDVLDKRRGRDPEMGGKPRRKNPQEGLYNELQKDKMAEAYSEIGMKGERRRGKGHDGLYQGLSTATKDTYDALHMQALPPR

SEQ ID NO: 1088 - protein, 247 aa, Artificial Sequence
  source: /note="Description of Artificial Sequence: Synthetic polypeptide"
QVQLQESGPGLVKPSETLSLTCTVSGVSLPDYGVSWIRQPPGKGLEWIGVIWGSETTYYNSSLKSRVTISKDNSKNQVSLKLSSVTAADTAVYYCAKHYYYGGSYAMDYWGQGTLVTVSSGGGGSGGGGSGGGGSGGGGSEIVMTQSPATLSLSPGERATLSCRASQDISKYLNWYQQKPGQAPRLLIYHTSRLHSGIPARFSGSGSGTDYTLTISSLQPEDFAVYFCQQGNTLPYTFGQGTKLEIK

SEQ ID NO: 1089 - protein, 491 aa, Artificial Sequence; identical to SEQ ID NO: 1087
  source: /note="Description of Artificial Sequence: Synthetic polypeptide"

SEQ ID NO: 1090 - protein, 242 aa, Artificial Sequence
  source: /note="Description of Artificial Sequence: Synthetic polypeptide"
EIVMTQSPATLSLSPGERATLSCRASQDISKYLNWYQQKPGQAPRLLIYHTSRLHSGIPARFSGSGSGTDYTLTISSLQPEDFAVYFCQQGNTLPYTFGQGTKLEIKGGGGSGGGGSGGGGSQVQLQESGPGLVKPSETLSLTCTVSGVSLPDYGVSWIRQPPGKGLEWIGVIWGSETTYYNSSLKSRVTISKDNSKNQVSLKLSSVTAADTAVYYCAKHYYYGGSYAMDYWGQGTLVTVSS

SEQ ID NO: 1091 - protein, 491 aa, Artificial Sequence
  source: /note="Description of Artificial Sequence: Synthetic polypeptide"
MALPVTALLLPLALLLHAARPQVQLQESGPGLVKPSETLSLTCTVSGVSLPDYGVSWIRQPPGKGLEWIGVIWGSETTYYNSSLKSRVTISKDNSKNQVSLKLSSVTAADTAVYYCAKHYYYGGSYAMDYWGQGTLVTVSSGGGGSGGGGSGGGGSGGGGSEIVMTQSPATLSLSPGERATLSCRASQDISKYLNWYQQKPGQAPRLLIYHTSRLHSGIPARFSGSGSGTDYTLTISSLQPEDFAVYFCQQGNTLPYTFGQGTKLEIKTTTPAPRPPTPAPTIASQPLSLRPEACRPAAGGAVHTRGLDFACDIYIWAPLAGTCGVLLLSLVITLYCKRGRKKLLYIFKQPFMRPVQTTQEEDGCSCRFPEEEEGGCELRVKFSRSADAPAYKQGQNQLYNELNLGRREEYDVLDKRRGRDPEMGGKPRRKNPQEGLYNELQKDKMAEAYSEIGMKGERRRGKGHDGLYQGLSTATKDTYDALHMQALPPR

SEQ ID NO: 1092 - protein, 242 aa, Artificial Sequence
  source: /note="Description of Artificial Sequence: Synthetic polypeptide"
QVQLQESGPGLVKPSETLSLTCTVSGVSLPDYGVSWIRQPPGKGLEWIGVIWGSETTYYNSSLKSRVTISKDNSKNQVSLKLSSVTAADTAVYYCAKHYYYGGSYAMDYWGQGTLVTVSSGGGGSGGGGSGGGGSEIVMTQSPATLSLSPGERATLSCRASQDISKYLNWYQQKPGQAPRLLIYHTSRLHSGIPARFSGSGSGTDYTLTISSLQPEDFAVYFCQQGNTLPYTFGQGTKLEIK

SEQ ID NO: 1093 - protein, 486 aa, Artificial Sequence
  source: /note="Description of Artificial Sequence: Synthetic polypeptide"
MALPVTALLLPLALLLHAARPEIVMTQSPATLSLSPGERATLSCRASQDISKYLNWYQQKPGQAPRLLIYHTSRLHSGIPARFSGSGSGTDYTLTISSLQPEDFAVYFCQQGNTLPYTFGQGTKLEIKGGGGSGGGGSGGGGSQVQLQESGPGLVKPSETLSLTCTVSGVSLPDYGVSWIRQPPGKGLEWIGVIWGSETTYYNSSLKSRVTISKDNSKNQVSLKLSSVTAADTAVYYCAKHYYYGGSYAMDYWGQGTLVTVSSTTTPAPRPPTPAPTIASQPLSLRPEACRPAAGGAVHTRGLDFACDIYIWAPLAGTCGVLLLSLVITLYCKRGRKKLLYIFKQPFMRPVQTTQEEDGCSCRFPEEEEGGCELRVKFSRSADAPAYKQGQNQLYNELNLGRREEYDVLDKRRGRDPEMGGKPRRKNPQEGLYNELQKDKMAEAYSEIGMKGERRRGKGHDGLYQGLSTATKDTYDALHMQALPPR

SEQ ID NO: 1094 - protein, 5 aa, Artificial Sequence
  source: /note="Description of Artificial Sequence: Synthetic peptide"
DYGVS

SEQ ID NO: 1095 - protein, 16 aa, Artificial Sequence
  source: /note="Description of Artificial Sequence: Synthetic peptide"
VIWGSETTYYNSALKS

SEQ ID NO: 1096 - protein, 12 aa, Artificial Sequence
  source: /note="Description of Artificial Sequence: Synthetic peptide"
HYYYGGSYAMDY

SEQ ID NO: 1097 - protein, 11 aa, Artificial Sequence
  source: /note="Description of Artificial Sequence: Synthetic peptide"
RASQDISKYLN

SEQ ID NO: 1098 - protein, 7 aa, Artificial Sequence
  source: /note="Description of Artificial Sequence: Synthetic peptide"
HTSRLHS

SEQ ID NO: 1099 - protein, 9 aa, Artificial Sequence
  source: /note="Description of Artificial Sequence: Synthetic peptide"
QQGNTLPYT

SEQ ID NO: 1100 - protein, 5 aa, Artificial Sequence
  source: /note="Description of Artificial Sequence: Synthetic peptide"
DYGVS

SEQ ID NO: 1101 - protein, 16 aa, Artificial Sequence
  source: /note="Description of Artificial Sequence: Synthetic peptide"
VIWGSETTYYSSSLKS

SEQ ID NO: 1102 - protein, 12 aa, Artificial Sequence
  source: /note="Description of Artificial Sequence: Synthetic peptide"
HYYYGGSYAMDY

SEQ ID NO: 1103 - protein, 11 aa, Artificial Sequence
  source: /note="Description of Artificial Sequence: Synthetic peptide"
RASQDISKYLN

SEQ ID NO: 1104 - protein, 7 aa, Artificial Sequence
  source: /note="Description of Artificial Sequence: Synthetic peptide"
HTSRLHS

SEQ ID NO: 1105 - protein, 9 aa, Artificial Sequence
  source: /note="Description of Artificial Sequence: Synthetic peptide"
QQGNTLPYT

SEQ ID NO: 1106 - protein, 5 aa, Artificial Sequence
  source: /note="Description of Artificial Sequence: Synthetic peptide"
DYGVS

SEQ ID NO: 1107 - protein, 16 aa, Artificial Sequence
  source: /note="Description of Artificial Sequence: Synthetic peptide"
VIWGSETTYYQSSLKS

SEQ ID NO: 1108 - protein, 12 aa, Artificial Sequence
  source: /note="Description of Artificial Sequence: Synthetic peptide"
HYYYGGSYAMDY

SEQ ID NO: 1109 - protein, 11 aa, Artificial Sequence
  source: /note="Description of Artificial Sequence: Synthetic peptide"
RASQDISKYLN

SEQ ID NO: 1110 - protein, 7 aa, Artificial Sequence
  source: /note="Description of Artificial Sequence: Synthetic peptide"
HTSRLHS

SEQ ID NO: 1111 - protein, 9 aa, Artificial Sequence
  source: /note="Description of Artificial Sequence: Synthetic peptide"
QQGNTLPYT

SEQ ID NO: 1112 - protein, 5 aa, Artificial Sequence
  source: /note="Description of Artificial Sequence: Synthetic peptide"
DYGVS

SEQ ID NO: 1113 - protein, 16 aa, Artificial Sequence
  source: /note="Description of Artificial Sequence: Synthetic peptide"
VIWGSETTYYNSSLKS

SEQ ID NO: 1114 - protein, 12 aa, Artificial Sequence
  source: /note="Description of Artificial Sequence: Synthetic peptide"
HYYYGGSYAMDY

SEQ ID NO: 1115 - protein, 11 aa, Artificial Sequence
  source: /note="Description of Artificial Sequence: Synthetic peptide"
RASQDISKYLN

SEQ ID NO: 1116 - protein, 7 aa, Artificial Sequence
  source: /note="Description of Artificial Sequence: Synthetic peptide"
HTSRLHS

SEQ ID NO: 1117 - protein, 9 aa, Artificial Sequence
  source: /note="Description of Artificial Sequence: Synthetic peptide"
QQGNTLPYT

SEQ ID NO: 1118 - protein, 5 aa, Artificial Sequence
  source: /note="Description of Artificial Sequence: Synthetic peptide"
NHGMS

SEQ ID NO: 1119 - protein, 5 aa, Artificial Sequence
  source: /note="Description of Artificial Sequence: Synthetic peptide"
NYAMS

SEQ ID NO: 1120 - protein, 5 aa, Artificial Sequence
  source: /note="Description of Artificial Sequence: Synthetic peptide"
DYAMH

SEQ ID NO: 1121 - protein, 5 aa, Artificial Sequence
  source: /note="Description of Artificial Sequence: Synthetic peptide"
NHGMS

SEQ ID NO: 1122 - protein, 5 aa, Artificial Sequence
  source: /note="Description of Artificial Sequence: Synthetic peptide"
NFGIN

SEQ ID NO: 1123 - protein, 5 aa, Artificial Sequence
  source: /note="Description of Artificial Sequence: Synthetic peptide"
SDAMT

SEQ ID NO: 1124 - protein, 5 aa, Artificial Sequence
  source: /note="Description of Artificial Sequence: Synthetic peptide"
NYGIT

SEQ ID NO: 1125 - protein, 5 aa, Artificial Sequence
  source: /note="Description of Artificial Sequence: Synthetic peptide"
NHGMS

SEQ ID NO: 1126 - protein, 5 aa, Artificial Sequence
  source: /note="Description of Artificial Sequence: Synthetic peptide"
NHGMS

SEQ ID NO: 1127 - protein, 5 aa, Artificial Sequence
  source: /note="Description of Artificial Sequence: Synthetic peptide"
NHGMS

SEQ ID NO: 1128 - protein, 5 aa, Artificial Sequence
  source: /note="Description of Artificial Sequence: Synthetic peptide"
DYYMS

SEQ ID NO: 1129 - protein, 5 aa, Artificial Sequence
  source: /note="Description of Artificial Sequence: Synthetic peptide"
DYYMS

SEQ ID NO: 1130 - protein, 5 aa, Artificial Sequence
  source: /note="Description of Artificial Sequence: Synthetic peptide"
NHGMS

SEQ ID NO: 1131 - protein, 5 aa, Artificial Sequence
  source: /note="Description of Artificial Sequence: Synthetic peptide"
NHGMS

SEQ ID NO: 1132 - protein, 5 aa, Artificial Sequence
  source: /note="Description of Artificial Sequence: Synthetic peptide"
NHGMS

SEQ ID NO: 1133 - protein, 7 aa, Artificial Sequence
  source: /note="Description of Artificial Sequence: Synthetic peptide"
SSYYYWG

SEQ ID NO: 1134 - protein, 7 aa, Artificial Sequence
  source: /note="Description of Artificial Sequence: Synthetic peptide"
TSGMCVS

SEQ ID NO: 1135 - protein, 5 aa, Artificial Sequence
  source: /note="Description of Artificial Sequence: Synthetic peptide"
SYSMN

SEQ ID NO: 1136 - protein, 5 aa, Artificial Sequence
  source: /note="Description of Artificial Sequence: Synthetic peptide"
DYYMS

SEQ ID NO: 1137 - protein, 5 aa, Artificial Sequence
  source: /note="Description of Artificial Sequence: Synthetic peptide"
SHYIH

SEQ ID NO: 1138 - protein, 7 aa, Artificial Sequence
  source: /note="Description of Artificial Sequence: Synthetic peptide"
SGGYYWS

SEQ ID NO: 1139 - protein, 5 aa, Artificial Sequence
  source: /note="Description of Artificial Sequence: Synthetic peptide"
SYAIS

SEQ ID NO: 1140 - protein, 7 aa, Artificial Sequence
  source: /note="Description of Artificial Sequence: Synthetic peptide"
SNSAAWN

SEQ ID NO: 1141 - protein, 5 aa, Artificial Sequence
  source: /note="Description of Artificial Sequence: Synthetic peptide"
SYAMS

SEQ ID NO: 1142 - protein, 5 aa, Artificial Sequence
  source: /note="Description of Artificial Sequence: Synthetic peptide"
RYPMS

SEQ ID NO: 1143 - protein, 5 aa, Artificial Sequence
  source: /note="Description of Artificial Sequence: Synthetic peptide"
SYAMS

SEQ ID NO: 1144 - protein, 5 aa, Artificial Sequence
  source: /note="Description of Artificial Sequence: Synthetic peptide"
SYAMS

SEQ ID NO: 1145 - protein, 5 aa, Artificial Sequence
  source: /note="Description of Artificial Sequence: Synthetic peptide"
DYAMH

SEQ ID NO: 1146 - protein, 5 aa, Artificial Sequence
  source: /note="Description of Artificial Sequence: Synthetic peptide"
DYAMH

SEQ ID NO: 1147 - protein, 5 aa, Artificial Sequence
  source: /note="Description of Artificial Sequence: Synthetic peptide"
SYAMS

SEQ ID NO: 1148 - protein, 5 aa, Artificial Sequence
  source: /note="Description of Artificial Sequence: Synthetic peptide"
SYAMS

SEQ ID NO: 1149 - protein, 5 aa, Artificial Sequence
  source: /note="Description of Artificial Sequence: Synthetic peptide"
SYAMS

SEQ ID NO: 1150 - protein, 5 aa, Artificial Sequence
  source: /note="Description of Artificial Sequence: Synthetic peptide"
SYAMS

SEQ ID NO: 1151 - protein, 5 aa, Artificial Sequence
  source: /note="Description of Artificial Sequence: Synthetic peptide"
SYAMS

SEQ ID NO: 1152 - protein, 5 aa, Artificial Sequence
  source: /note="Description of Artificial Sequence: Synthetic peptide"
SYAMS

SEQ ID NO: 1153 - protein, 5 aa, Artificial Sequence
  source: /note="Description of Artificial Sequence: Synthetic peptide"
SYAMS

SEQ ID NO: 1154 - protein, 5 aa, Artificial Sequence
  source: /note="Description of Artificial Sequence: Synthetic peptide"
NFGMN

SEQ ID NO: 1155 - protein, 5 aa, Artificial Sequence
  source: /note="Description of Artificial Sequence: Synthetic peptide"
DYSIN

SEQ ID NO: 1156 - protein, 5 aa, Artificial Sequence
  source: /note="Description of Artificial Sequence: Synthetic peptide"
HYSMN

SEQ ID NO: 1157 - protein, 5 aa, Artificial Sequence
  source: /note="Description of Artificial Sequence: Synthetic peptide"
HYSMN

SEQ ID NO: 1158 - protein, 16 aa, Artificial Sequence
  source: /note="Description of Artificial Sequence: Synthetic peptide"
GIVYSGSTYYAASVKG

SEQ ID NO: 1159 - protein, 17 aa, Artificial Sequence
  source: /note="Description of Artificial Sequence: Synthetic peptide"
GISRSGENTYYADSVKG

SEQ ID NO: 1160 - protein, 17 aa, Artificial Sequence
  source: /note="Description of Artificial Sequence: Synthetic peptide"
GISWNSGSIGYADSVKG

SEQ ID NO: 1161 - protein, 16 aa, Artificial Sequence
  source: /note="Description of Artificial Sequence: Synthetic peptide"
GIVYSGSTYYAASVKG

SEQ ID NO: 1162 - protein, 17 aa, Artificial Sequence
  source: /note="Description of Artificial Sequence: Synthetic peptide"
WINPKNNNTNYAQKFQG

SEQ ID NO: 1163 - protein, 17 aa, Artificial Sequence
  source: /note="Description of Artificial Sequence: Synthetic peptide"
VISGSGGTTYYADSVKG

SEQ ID NO: 1164 - protein, 17 aa, Artificial Sequence
  source: /note="Description of Artificial Sequence: Synthetic peptide"
WISAYNGNTNYAQKFQG

SEQ ID NO: 1165 - protein, 16 aa, Artificial Sequence
  source: /note="Description of Artificial Sequence: Synthetic peptide"
GIVYSGSTYYAASVKG

SEQ ID NO: 1166 - protein, 16 aa, Artificial Sequence
  source: /note="Description of Artificial Sequence: Synthetic peptide"
GIVYSGSTYYAASVKG

SEQ ID NO: 1167 - protein, 16 aa, Artificial Sequence
  source: /note="Description of Artificial Sequence: Synthetic peptide"
GIVYSGSTYYAASVKG

SEQ ID NO: 1168 - protein, 17 aa, Artificial Sequence
  source: /note="Description of Artificial Sequence: Synthetic peptide"
YISSSGSTIYYADSVKG

SEQ ID NO: 1169 - protein, 17 aa, Artificial Sequence
  source: /note="Description of Artificial Sequence: Synthetic peptide"
YISSSGNTIYYADSVKG

SEQ ID NO: 1170 - protein, 16 aa, Artificial Sequence
  source: /note="Description of Artificial Sequence: Synthetic peptide"
GIVYSGSTYYAASVKG

SEQ ID NO: 1171 - protein, 16 aa, Artificial Sequence
  source: /note="Description of Artificial Sequence: Synthetic peptide"
GIVYSGSTYYAASVKG

SEQ ID NO: 1172 - protein, 16 aa, Artificial Sequence
  source: /note="Description of Artificial Sequence: Synthetic peptide"
GIVYSGSTYYAASVKG

SEQ ID NO: 1173 - protein, 16 aa, Artificial Sequence
  source: /note="Description of Artificial Sequence: Synthetic peptide"
SIYYSGSAYYNPSLKS

SEQ ID NO: 1174 - protein, 16 aa, Artificial Sequence
  source: /note="Description of Artificial Sequence: Synthetic peptide"
RIDWDEDKFYSTSLKT

SEQ ID NO: 1175 - protein, 17 aa, Artificial Sequence
  source: /note="Description of Artificial Sequence: Synthetic peptide"
SISSSSSYIYYADSVKG

SEQ ID NO: 1176 - protein, 17 aa, Artificial Sequence
  source: /note="Description of Artificial Sequence: Synthetic peptide"
YISSSGSTIYYADSVKG

SEQ ID NO: 1177 - protein, 17 aa, Artificial Sequence
  source: /note="Description of Artificial Sequence: Synthetic peptide"
MINPSGGVTAYSQTLQG

SEQ ID NO: 1178 - protein, 16 aa, Artificial Sequence
  source: /note="Description of Artificial Sequence: Synthetic peptide"
YIYYSGSTYYNPSLKS

SEQ ID NO: 1179 - protein, 17 aa, Artificial Sequence
  source: /note="Description of Artificial Sequence: Synthetic peptide"
GIIPIFGTANYAQKFQG

SEQ ID NO: 1180 - protein, 18 aa, Artificial Sequence
  source: /note="Description of Artificial Sequence: Synthetic peptide"
RTYYRSKWYSFYAISLKS

SEQ ID NO: 1181 - protein, 17 aa, Artificial Sequence
  source: /note="Description of Artificial Sequence: Synthetic peptide"
AISGSGGSTYYADSVKG

SEQ ID NO: 1182 - protein, 17 aa, Artificial Sequence
  source: /note="Description of Artificial Sequence: Synthetic peptide"
GISDSGVSTYYADSAKG

SEQ ID NO: 1183 - protein, 17 aa, Artificial Sequence
  source: /note="Description of Artificial Sequence: Synthetic peptide"
AISGSGGSTYYADSVKG

SEQ ID NO: 1184 - protein, 17 aa, Artificial Sequence
  source: /note="Description of Artificial Sequence: Synthetic peptide"
AISGSGGSTYYADSVKG

SEQ ID NO: 1185 - protein, 17 aa, Artificial Sequence
  source: /note="Description of Artificial Sequence: Synthetic peptide"
GISWNSGSIGYADSVKG

SEQ ID NO: 1186 - protein, 17 aa, Artificial Sequence
  source: /note="Description of Artificial Sequence: Synthetic peptide"
SINWKGNSLAYGDSVKG

SEQ ID NO: 1187 - protein, 17 aa, Artificial Sequence
  source: /note="Description of Artificial Sequence: Synthetic peptide"
AISGSGGSTYYADSVKG

SEQ ID NO: 1188 - protein, 17 aa, Artificial Sequence
  source: /note="Description of Artificial Sequence: Synthetic peptide"
AISGSGGSTYYADSVKG

SEQ ID NO: 1189 - protein, 17 aa, Artificial Sequence
  source: /note="Description of Artificial Sequence: Synthetic peptide"
AISGSGGSTYYADSVKG

SEQ ID NO: 1190 - protein, 17 aa, Artificial Sequence
  source: /note="Description of Artificial Sequence: Synthetic peptide"
AISGSGGSTYYADSVKG

SEQ ID NO: 1191 - protein, 17 aa, Artificial Sequence
  source: /note="Description of Artificial Sequence: Synthetic peptide"
AISGSGGSTYYADSVKG

SEQ ID NO: 1192 - protein, 17 aa, Artificial Sequence
  source: /note="Description of Artificial Sequence: Synthetic peptide"
AISGSGGSTYYADSVKG

SEQ ID NO: 1193 - protein, 17 aa, Artificial Sequence
  source: /note="Description of Artificial Sequence: Synthetic peptide"
AISGSGGSTYYADSVKG

SEQ ID NO: 1194 - protein, 17 aa, Artificial Sequence
  source: /note="Description of Artificial Sequence: Synthetic peptide"
WINTYTGESYFADDFKG

SEQ ID NO: 1195 - protein, 17 aa, Artificial Sequence
  source: /note="Description of Artificial Sequence: Synthetic peptide"
WINTETREPAYAYDFRG

SEQ ID NO: 1196 - protein, 17 aa, Artificial Sequence
  source: /note="Description of Artificial Sequence: Synthetic peptide"
RINTESGVPIYADDFKG

SEQ ID NO: 1197 - protein, 17 aa, Artificial Sequence
  source: /note="Description of Artificial Sequence: Synthetic peptide"
RINTETGEPLYADDFKG

SEQ ID NO: 1198 - protein, 7 aa, Artificial Sequence
  source: /note="Description of Artificial Sequence: Synthetic peptide"
HGGESDV

SEQ ID NO: 1199 - protein, 11 aa, Artificial Sequence
  source: /note="Description of Artificial Sequence: Synthetic peptide"
SPAHYYGGMDV

SEQ ID NO: 1200 - protein, 6 aa, Artificial Sequence
  source: /note="Description of Artificial Sequence: Synthetic peptide"
HSFLAY

SEQ ID NO: 1201 - protein, 7 aa, Artificial Sequence
  source: /note="Description of Artificial Sequence: Synthetic peptide"
HGGESDV

SEQ ID NO: 1202 - protein, 11 aa, Artificial Sequence
  source: /note="Description of Artificial Sequence: Synthetic peptide"
GPYYYQSYMDV

SEQ ID NO: 1203 - protein, 14 aa, Artificial Sequence
  source: /note="Description of Artificial Sequence: Synthetic peptide"
LDSSGYYYARGPRY

SEQ ID NO: 1204 - protein, 9 aa, Artificial Sequence
  source: /note="Description of Artificial Sequence: Synthetic peptide"
GPYYYYMDV

SEQ ID NO: 1205 - protein, 7 aa, Artificial Sequence
  source: /note="Description of Artificial Sequence: Synthetic peptide"
HGGESDV

SEQ ID NO: 1206 - protein, 7 aa, Artificial Sequence
  source: /note="Description of Artificial Sequence: Synthetic peptide"
HGGESDV

SEQ ID NO: 1207 - protein, 7 aa, Artificial Sequence
  source: /note="Description of Artificial Sequence: Synthetic peptide"
HGGESDV

SEQ ID NO: 1208 - protein, 8 aa, Artificial Sequence
  source: /note="Description of Artificial Sequence: Synthetic peptide"
ESGDGMDV

SEQ ID NO: 1209 - protein, 8 aa, Artificial Sequence
  source: /note="Description of Artificial Sequence: Synthetic peptide"
STMVREDY

SEQ ID NO: 1210 - protein, 7 aa, Artificial Sequence
  source: /note="Description of Artificial Sequence: Synthetic peptide"
HGGESDV

SEQ ID NO: 1211 - protein, 7 aa, Artificial Sequence
  source: /note="Description of Artificial Sequence: Synthetic peptide"
HGGESDV

SEQ ID NO: 1212 - protein, 7 aa, Artificial Sequence
  source: /note="Description of Artificial Sequence: Synthetic peptide"
HGGESDV

SEQ ID NO: 1213 - protein, 11 aa, Artificial Sequence
  source: /note="Description of Artificial Sequence: Synthetic peptide"
HWQEWPDAFDI

SEQ ID NO: 1214 - protein, 13 aa, Artificial Sequence
  source: /note="Description of Artificial Sequence: Synthetic peptide"
SGAGGTSATAFDI

SEQ ID NO: 1215 - protein, 10 aa, Artificial Sequence
  source: /note="Description of Artificial Sequence: Synthetic peptide"
TIAAVYAFDI

SEQ ID NO: 1216 - protein, 8 aa, Artificial Sequence
  source: /note="Description of Artificial Sequence: Synthetic peptide"
DLRGAFDI

SEQ ID NO: 1217 - protein, 11 aa, Artificial Sequence
  source: /note="Description of Artificial Sequence: Synthetic peptide"
EGSGSGWYFDF

SEQ ID NO: 1218 - protein, 13 aa, Artificial Sequence
  source: /note="Description of Artificial Sequence: Synthetic peptide"
AGIAARLRGAFDI

SEQ ID NO: 1219 - protein, 20 aa, Artificial Sequence
  source: /note="Description of Artificial Sequence: Synthetic peptide"
RGGYQLLRWDVGLLRSAFDI

SEQ ID NO: 1220 - protein, 13 aa, Artificial Sequence
  source: /note="Description of Artificial Sequence: Synthetic peptide"
SSPEGLFLYWFDP

SEQ ID NO: 1221 - protein, 9 aa, Artificial Sequence
  source: /note="Description of Artificial Sequence: Synthetic peptide"
VEGSGSLDY

SEQ ID NO: 1222 - protein, 9 aa, Artificial Sequence
  source: /note="Description of Artificial Sequence: Synthetic peptide"
RAGSEASDI

SEQ ID NO: 1223 - protein, 15 aa, Artificial Sequence
  source: /note="Description of Artificial Sequence: Synthetic peptide"
ATYKRELRYYYGMDV

SEQ ID NO: 1224 - protein, 15 aa, Artificial Sequence
  source: /note="Description of Artificial Sequence: Synthetic peptide"
ATYKRELRYYYGMDV

SEQ ID NO: 1225 - protein, 8 aa, Artificial Sequence
  source: /note="Description of Artificial Sequence: Synthetic peptide"
VGKAVPDV

SEQ ID NO: 1226 - protein, 13 aa, Artificial Sequence
  source: /note="Description of Artificial Sequence: Synthetic peptide"
HQGVAYYNYAMDV

SEQ ID NO: 1227 - protein, 8 aa, Artificial Sequence
  source: /note="Description of Artificial Sequence: Synthetic peptide"
VVRDGMDV

SEQ ID NO: 1228 - protein, 9 aa, Artificial Sequence
  source: /note="Description of Artificial Sequence: Synthetic peptide"
IPQTGTFDY

SEQ ID NO: 1229 - protein, 15 aa, Artificial Sequence
  source: /note="Description of Artificial Sequence: Synthetic peptide"
ANYKRELRYYYGMDV

SEQ ID NO: 1230 - protein, 11 aa, Artificial Sequence
  source: /note="Description of Artificial Sequence: Synthetic peptide"
ALVGATGAFDI

SEQ ID NO: 1231 - protein, 8 aa, Artificial Sequence
  source: /note="Description of Artificial Sequence: Synthetic peptide"
WFGEGFDP

SEQ ID NO: 1232 - protein, 17 aa, Artificial Sequence
  source: /note="Description of Artificial Sequence: Synthetic peptide"
VGYDSSGYYRDYYGMDV

SEQ ID NO: 1233 - protein, 13 aa, Artificial Sequence
  source: /note="Description of Artificial Sequence: Synthetic peptide"
MGWSSGYLGAFDI

SEQ ID NO: 1234 - protein, 13 aa, Artificial Sequence
  source: /note="Description of Artificial Sequence: Synthetic peptide"
GEIYYGYDGGFAY

SEQ ID NO: 1235 - protein, 8 aa, Artificial Sequence
  source: /note="Description of Artificial Sequence: Synthetic peptide"
DYSYAMDY

SEQ ID NO: 1236 - protein, 8 aa, Artificial Sequence
  source: /note="Description of Artificial Sequence: Synthetic peptide"
DYLYSLDF

SEQ ID NO: 1237 - protein, 8 aa, Artificial Sequence
  source: /note="Description of Artificial Sequence: Synthetic peptide"
DYLYSCDY

SEQ ID NO: 1238 - protein, 11 aa, Artificial Sequence
  source: /note="Description of Artificial Sequence: Synthetic peptide"
RASQSISSYLN

SEQ ID NO: 1239 - protein, 12 aa, Artificial Sequence
  source: /note="Description of Artificial Sequence: Synthetic peptide"
RASQSISSSFLA

SEQ ID NO: 1240 - protein, 16 aa, Artificial Sequence
  source: /note="Description of Artificial Sequence: Synthetic peptide"
RSSQSLLHSNGYNYLD

SEQ ID NO: 1241 - protein, 16 aa, Artificial Sequence
  source: /note="Description of Artificial Sequence: Synthetic peptide"
KSSQSLLRNDGKTPLY

SEQ ID NO: 1242 - protein, 16 aa, Artificial Sequence
  source: /note="Description of Artificial Sequence: Synthetic peptide"
RSSQSLLHSNGYNYLN

SEQ ID NO: 1243 - protein, 11 aa, Artificial Sequence
  source: /note="Description of Artificial Sequence: Synthetic peptide"
RASQSISSYLN

SEQ ID NO: 1244 - protein, 16 aa, Artificial Sequence
  source: /note="Description of Artificial Sequence: Synthetic peptide"
RSSQSLLYSNGYNYVD

SEQ ID NO: 1245 - protein, 11 aa, Artificial Sequence
  source: /note="Description of Artificial Sequence: Synthetic peptide"
RASQSVSSNLA

SEQ ID NO: 1246 - protein, 11 aa, Artificial Sequence
  source: /note="Description of Artificial Sequence: Synthetic peptide"
RASQSVSSKLA

SEQ ID NO: 1247 - protein, 12 aa, Artificial Sequence
  source: /note="Description of Artificial Sequence: Synthetic peptide"
RASQSVGSTNLA

SEQ ID NO: 1248 - protein, 11 aa, Artificial Sequence
  source: /note="Description of Artificial Sequence: Synthetic peptide"
RASQSISSYLN

SEQ ID NO: 1249 - protein, 16 aa, Artificial Sequence
  source: /note="Description of Artificial Sequence: Synthetic peptide"
KSSESLVHNSGKTYLN

SEQ ID NO: 1250 - protein, 11 aa, Artificial Sequence
  source: /note="Description of Artificial Sequence: Synthetic peptide"
QASEDINKFLN

SEQ ID NO: 1251 - protein, 11 aa, Artificial Sequence
  source: /note="Description of Artificial Sequence: Synthetic peptide"
RASQSVGSNLA

SEQ ID NO: 1252 - protein, 12 aa, Artificial Sequence
  source: /note="Description of Artificial Sequence: Synthetic peptide"
RASQSIGSSSLA

SEQ ID NO: 1253 - protein, 11 aa, Artificial Sequence
  source: /note="Description of Artificial Sequence: Synthetic peptide"
KASQDIDDAMN

SEQ ID NO: 1254 - protein, 11 aa, Artificial Sequence
  source: /note="Description of Artificial Sequence: Synthetic peptide"
RASQDIYNNLA

SEQ ID NO: 1255 - protein, 16 aa, Artificial Sequence
  source: /note="Description of Artificial Sequence: Synthetic peptide"
RSSQSLLHSNGYNYLD

SEQ ID NO: 1256 - protein, 11 aa, Artificial Sequence
  source: /note="Description of Artificial Sequence: Synthetic peptide"
GGNNIGTKSVH

SEQ ID NO: 1257 - protein, 11 aa, Artificial Sequence
  source: /note="Description of Artificial Sequence: Synthetic peptide"
SGDGLSKKYVS

SEQ ID NO: 1258 - protein, 11 aa, Artificial Sequence
  source: /note="Description of Artificial Sequence: Synthetic peptide"
RASQGIRNWLA

SEQ ID NO: 1259 - protein, 11 aa, Artificial Sequence
  source: /note="Description of Artificial Sequence: Synthetic peptide"
GGNNIGSKSVH

SEQ ID NO: 1260 - protein, 11 aa, Artificial Sequence
  source: /note="Description of Artificial Sequence: Synthetic peptide"
QGDSLGNYYAT

SEQ ID NO: 1261 - protein, 12 aa, Artificial Sequence
  source: /note="Description of Artificial Sequence: Synthetic peptide"
RASQSVSSAYLA

SEQ ID NO: 1262 - protein, 11 aa, Artificial Sequence
  source: /note="Description of Artificial Sequence: Synthetic peptide"
RASQSVSNSLA

SEQ ID NO: 1263 - protein, 12 aa, Artificial Sequence
  source: /note="Description of Artificial Sequence: Synthetic peptide"
RASQSVSSSFLA

SEQ ID NO: 1264 - protein, 12 aa, Artificial Sequence
  source: /note="Description of Artificial Sequence: Synthetic peptide"
RASQSVSTTFLA

SEQ ID NO: 1265 - protein, 11 aa, Artificial Sequence
  source: /note="Description of Artificial Sequence: Synthetic peptide"
RASQSISSYLN

SEQ ID NO: 1266 - protein, 12 aa, Artificial Sequence
  source: /note="Description of Artificial Sequence: Synthetic peptide"
RATQSIGSSFLA

SEQ ID NO: 1267 - protein, 12 aa, Artificial Sequence
  source: /note="Description of Artificial Sequence: Synthetic peptide"
RASQSVSSSYLA

SEQ ID NO: 1268 - protein, 12 aa, Artificial Sequence
  source: /note="Description of Artificial Sequence: Synthetic peptide"
RASQSVSSSYLA

SEQ ID NO: 1269 - protein, 12 aa, Artificial Sequence
  source: /note="Description of Artificial Sequence: Synthetic peptide"
RASQRVASNYLA

SEQ ID NO: 1270 - protein, 12 aa, Artificial Sequence
  source: /note="Description of Artificial Sequence: Synthetic peptide"
RASQSLSSNFLA

SEQ ID NO: 1271 - protein, 16 aa, Artificial Sequence
  source: /note="Description of Artificial Sequence: Synthetic peptide"
RSSQSLLHSNGYNYLD

SEQ ID NO: 1272 - protein, 12 aa, Artificial Sequence
  source: /note="Description of Artificial Sequence: Synthetic peptide"
RASQSVSSSYLA

SEQ ID NO: 1273 - protein, 12 aa, Artificial Sequence
  source: /note="Description of Artificial Sequence: Synthetic peptide"
RASQSVASSFLA

SEQ ID NO: 1274 - protein, 11 aa, Artificial Sequence
  source: /note="Description of Artificial Sequence: Synthetic peptide"
RASQDVNTAVS

SEQ ID NO: 1275 - protein, 15 aa, Artificial Sequence
  source: /note="Description of Artificial Sequence: Synthetic peptide"
RASESVSVIGAHLIH

SEQ ID NO: 1276 - protein, 15 aa, Artificial Sequence
  source: /note="Description of Artificial Sequence: Synthetic peptide"
RASESVTILGSHLIY

SEQ ID NO: 1277 - protein, 15 aa, Artificial Sequence
  source: /note="Description of Artificial Sequence: Synthetic peptide"
RASESVTILGSHLIY

SEQ ID NO: 1278 - protein, 7 aa, Artificial Sequence
  source: /note="Description of Artificial Sequence: Synthetic peptide"
AASSLQS

SEQ ID NO: 1279 - protein, 7 aa, Artificial Sequence
  source: /note="Description of Artificial Sequence: Synthetic peptide"
GASRRAT

SEQ ID NO: 1280 - protein, 7 aa, Artificial Sequence
  source: /note="Description of Artificial Sequence: Synthetic peptide"
LGSNRAS

SEQ ID NO: 1281 - protein, 7 aa, Artificial Sequence
  source: /note="Description of Artificial Sequence: Synthetic peptide"
EVSNRFS

SEQ ID NO: 1282 - protein, 7 aa, Artificial Sequence
  source: /note="Description of Artificial Sequence: Synthetic peptide"
LGSKRAS

SEQ ID NO: 1283 - protein, 7 aa, Artificial Sequence
  source: /note="Description of Artificial Sequence: Synthetic peptide"
GASTLAS

SEQ ID NO: 1284 - protein, 7 aa, Artificial Sequence
  source: /note="Description of Artificial Sequence: Synthetic peptide"
LGSNRAS

SEQ ID NO: 1285 - protein, 7 aa, Artificial Sequence
  source: /note="Description of Artificial Sequence: Synthetic peptide"
GASTRAS

SEQ ID NO: 1286 - protein, 7 aa, Artificial Sequence
  source: /note="Description of Artificial Sequence: Synthetic peptide"
GASIRAT

SEQ ID NO: 1287 - protein, 7 aa, Artificial Sequence
  source: /note="Description of Artificial Sequence: Synthetic peptide"
DASNRAT

SEQ ID NO: 1288 - protein, 7 aa, Artificial Sequence
  source: /note="Description of Artificial Sequence: Synthetic peptide"
AASSLQS

SEQ ID NO: 1289 - protein, 7 aa, Artificial Sequence
  source: /note="Description of Artificial Sequence: Synthetic peptide"
EVSNRDS

SEQ ID NO: 1290 - protein, 7 aa, Artificial Sequence
  source: /note="Description of Artificial Sequence: Synthetic peptide"
DASTLQT

SEQ ID NO: 1291 - protein, 7 aa, Artificial Sequence
  source: /note="Description of Artificial Sequence: Synthetic peptide"
GASTRAT

SEQ ID NO: 1292 - protein, 7 aa, Artificial Sequence
  source: /note="Description of Artificial Sequence: Synthetic peptide"
GASSRAS

SEQ ID NO: 1293 - protein, 7 aa, Artificial Sequence
  source: /note="Description of Artificial Sequence: Synthetic peptide"
SATSPVP

SEQ ID NO: 1294 - protein, 7 aa, Artificial Sequence
  source: /note="Description of Artificial Sequence: Synthetic peptide"
AANKSQS

SEQ ID NO: 1295 - protein, 7 aa, Artificial Sequence
  source: /note="Description of Artificial Sequence: Synthetic peptide"
LGSNRAS

SEQ ID NO: 1296 - protein, 7 aa, Artificial Sequence
  source: /note="Description of Artificial Sequence: Synthetic peptide"
DDSVRPS

SEQ ID NO: 1297 - protein, 7 aa, Artificial Sequence
  source: /note="Description of Artificial Sequence: Synthetic peptide"
RDKERPS

SEQ ID NO: 1298 - protein, 7 aa, Artificial Sequence
  source: /note="Description of Artificial Sequence: Synthetic peptide"
AASNLQS

SEQ ID NO: 1299 - protein, 7 aa, Artificial Sequence
  source: /note="Description of Artificial Sequence: Synthetic peptide"
GKNNRPS

SEQ ID NO: 1300 - protein, 7 aa, Artificial Sequence
  source: /note="Description of Artificial Sequence: Synthetic peptide"
GTNNRPS

SEQ ID NO: 1301 - protein, 7 aa, Artificial Sequence
  source: /note="Description of Artificial Sequence: Synthetic peptide"
GASTRAT

SEQ ID NO: 1302 - protein, 7 aa, Artificial Sequence
  source: /note="Description of Artificial Sequence: Synthetic peptide"
DASSRAT

SEQ ID NO: 1303 - protein, 7 aa, Artificial Sequence
  source: /note="Description of Artificial Sequence: Synthetic peptide"
GASSRAT

SEQ ID NO: 1304 - protein, 7 aa, Artificial Sequence
  source: /note="Description of Artificial Sequence: Synthetic peptide"
GSSNRAT

SEQ ID NO: 1305 - protein, 7 aa, Artificial Sequence
  source: /note="Description of Artificial Sequence: Synthetic peptide"
AASSLQS

SEQ ID NO: 1306 - protein, 7 aa, Artificial Sequence
  source: /note="Description of Artificial Sequence: Synthetic peptide"
GASQRAT

SEQ ID NO: 1307 - protein, 7 aa, Artificial Sequence
  source: /note="Description of Artificial Sequence: Synthetic peptide"
GASSRAT

SEQ ID NO: 1308 - protein, 7 aa, Artificial Sequence
  source: /note="Description of Artificial Sequence: Synthetic peptide"
GASSRAT

SEQ ID NO: 1309 - protein, 7 aa, Artificial Sequence
  source: /note="Description of Artificial Sequence: Synthetic peptide"
GASSRAT

SEQ ID NO: 1310 - protein, 7 aa, Artificial Sequence
  source: /note="Description of Artificial Sequence: Synthetic peptide"
GASNWAT

SEQ ID NO: 1311 - protein, 7 aa, Artificial Sequence
  source: /note="Description of Artificial Sequence: Synthetic peptide"
LGSNRAS

SEQ ID NO: 1312 - protein, 7 aa, Artificial Sequence
  source: /note="Description of Artificial Sequence: Synthetic peptide"
GTSSRAT

SEQ ID NO: 1313 - protein, 7 aa, Artificial Sequence
  source: /note="Description of Artificial Sequence: Synthetic peptide"
GASGRAT

SEQ ID NO: 1314 - protein, 7 aa, Artificial Sequence
  source: /note="Description of Artificial Sequence: Synthetic peptide"
SASYRYT

SEQ ID NO: 1315 - protein, 7 aa, Artificial Sequence
  source: /note="Description of Artificial Sequence: Synthetic peptide"
LASNLET

SEQ ID NO: 1316 - protein, 7 aa, Artificial Sequence
  source: /note="Description of Artificial Sequence: Synthetic peptide"
LASNVQT

SEQ ID NO: 1317 - protein, 7 aa, Artificial Sequence
  source: /note="Description of Artificial Sequence: Synthetic peptide"
LASNVQT

SEQ ID NO: 1318 - protein, 9 aa, Artificial Sequence
  source: /note="Description of Artificial Sequence: Synthetic peptide"
QQSYSTPYT

SEQ ID NO: 1319 - protein, 10 aa, Artificial Sequence
  source: /note="Description of Artificial Sequence: Synthetic peptide"
QQYHSSPSWT

SEQ ID NO: 1320 - protein, 9 aa, Artificial Sequence
  source: /note="Description of Artificial Sequence: Synthetic peptide"
MQALQTPYT

SEQ ID NO: 1321 - protein, 8 aa, Artificial Sequence
  source: /note="Description of Artificial Sequence: Synthetic peptide"
MQNIQFPS

SEQ ID NO: 1322 - protein, 9 aa, Artificial Sequence
  source: /note="Description of Artificial Sequence: Synthetic peptide"
MQALQTPYT

SEQ ID NO: 1323 - protein, 8 aa, Artificial Sequence
  source: /note="Description of Artificial Sequence: Synthetic peptide"
QQSYKRAS

SEQ ID NO: 1324 - protein, 9 aa, Artificial Sequence
  source: /note="Description of Artificial Sequence: Synthetic peptide"
MQGRQFPYS

SEQ ID NO: 1325 - protein, 8 aa, Artificial Sequence
  source: /note="Description of Artificial Sequence: Synthetic peptide"
QQYGSSLT

SEQ ID NO: 1326 - protein, 9 aa, Artificial Sequence
  source: /note="Description of Artificial Sequence: Synthetic peptide"
QQYGSSSWT

SEQ ID NO: 1327 - protein, 10 aa, Artificial Sequence
  source: /note="Description of Artificial Sequence: Synthetic peptide"
QQYGSSPPWT

SEQ ID NO: 1328 - protein, 7 aa, Artificial Sequence
  source: /note="Description of Artificial Sequence: Synthetic peptide"
QQSYTLA

SEQ ID NO: 1329 - protein, 9 aa, Artificial Sequence
  source: /note="Description of Artificial Sequence: Synthetic peptide"
MQGTHWPGT

SEQ ID NO: 1330 - protein, 9 aa, Artificial Sequence
  source: /note="Description of Artificial Sequence: Synthetic peptide"
QQYESLPLT

SEQ ID NO: 1331 - protein, 10 aa, Artificial Sequence
  source: /note="Description of Artificial Sequence: Synthetic peptide"
QQYNDWLPVT

SEQ ID NO: 1332 - protein, 10 aa, Artificial Sequence
  source: /note="Description of Artificial Sequence: Synthetic peptide"
QQYAGSPPFT

SEQ ID NO: 1333 - protein, 9 aa, Artificial Sequence
  source: /note="Description of Artificial Sequence: Synthetic peptide"
LQHDNFPLT

SEQ ID NO: 1334 - protein, 9 aa, Artificial Sequence
  source: /note="Description of Artificial Sequence: Synthetic peptide"
QHYYRFPYS

SEQ ID NO: 1335 - protein, 9 aa, Artificial Sequence
  source: /note="Description of Artificial Sequence: Synthetic peptide"
MQALQTPYT

SEQ ID NO: 1336 - protein, 11 aa, Artificial Sequence
  source: /note="Description of Artificial Sequence: Synthetic peptide"
QVWDSDSEHVV

SEQ ID NO: 1337 - protein, 9 aa, Artificial Sequence
  source: /note="Description of Artificial Sequence: Synthetic peptide"
QAWDDTTVV

SEQ ID NO: 1338 - protein, 9 aa, Artificial Sequence
  source: /note="Description of Artificial Sequence: Synthetic peptide"
QKYNSAPFT

SEQ ID NO: 1339 - protein, 12 aa, Artificial Sequence
  source: /note="Description of Artificial Sequence: Synthetic peptide"
SSRDSSGDHLRV

SEQ ID NO: 1340 - protein, 11 aa, Artificial Sequence
  source: /note="Description of Artificial Sequence: Synthetic peptide"
NSRDSSGHHLL

SEQ ID NO: 1341 - protein, 14 aa, Artificial Sequence
  source: /note="Description of Artificial Sequence: Synthetic peptide"
QHYGSSFNGSSLFT

SEQ ID NO: 1342 - protein, 10 aa, Artificial Sequence
  source: /note="Description of Artificial Sequence: Synthetic peptide"
QQFGTSSGLT

SEQ ID NO: 1343 - protein, 10 aa, Artificial Sequence
  source: /note="Description of Artificial Sequence: Synthetic peptide"
QQYHSSPSWT

SEQ ID NO: 1344 - protein, 10 aa, Artificial Sequence
  source: /note="Description of Artificial Sequence: Synthetic peptide"
QQYHSSPSWT

SEQ ID NO: 1345 - protein, 9 aa, Artificial Sequence
  source: /note="Description of Artificial Sequence: Synthetic peptide"
QQSYSTPYS

SEQ ID NO: 1346 - protein, 10 aa, Artificial Sequence
  source: /note="Description of Artificial Sequence: Synthetic peptide"
QHYESSPSWT

SEQ ID NO: 1347 - protein, 10 aa, Artificial Sequence
  source: /note="Description of Artificial Sequence: Synthetic peptide"
QQYGSPPRFT

SEQ ID NO: 1348 - protein, 10 aa, Artificial Sequence
  source: /note="Description of Artificial Sequence: Synthetic peptide"
QHYGSSPSWT

SEQ ID NO: 1349 - protein, 10 aa, Artificial Sequence
  source: /note="Description of Artificial Sequence: Synthetic peptide"
QHYDSSPSWT

SEQ ID NO: 1350 - protein, 10 aa, Artificial Sequence
  source: /note="Description of Artificial Sequence: Synthetic peptide"
QYYGTSPMYT

SEQ ID NO: 1351 - protein, 9 aa, Artificial Sequence
  source: /note="Description of Artificial Sequence: Synthetic peptide"
MQALQTPLT

SEQ ID NO: 1352 - protein, 11 aa, Artificial Sequence
  source: /note="Description of Artificial Sequence: Synthetic peptide"
QHYGNSPPKFT

SEQ ID NO: 1353 - protein, 10 aa, Artificial Sequence
  source: /note="Description of Artificial Sequence: Synthetic peptide"
QHYGGSPRLT

SEQ ID NO: 1354 - protein, 9 aa, Artificial Sequence
  source: /note="Description of Artificial Sequence: Synthetic peptide"
QQHYSTPWT

SEQ ID NO: 1355 - protein, 9 aa, Artificial Sequence
  source: /note="Description of Artificial Sequence: Synthetic peptide"
LQSRIFPRT

SEQ ID NO: 1356 - protein, 9 aa, Artificial Sequence
  source: /note="Description of Artificial Sequence: Synthetic peptide"
LQSRTIPRT

SEQ ID NO: 1357 - protein, 9 aa, Artificial Sequence
  source: /note="Description of Artificial Sequence: Synthetic peptide"
LQSRTIPRT

SEQ ID NO: 1358 - protein, 246 aa, Artificial Sequence
  source: /note="Description of Artificial Sequence: Synthetic polypeptide"
EIQLVQSGAEVKKPGATVKISCKGSGFNIEDYYIHWVQQAPGKGLEWMGRIDPENDETKYGPIFQGRVTITADTSTNTVYMELSSLRSEDTAVYYCAFRGGVYWGQGTTVTVSSGGGGSGGGGSGGGGSGGGGSDVVMTQSPDSLAVSLGERATINCKSSQSLLDSDGKTYLNWLQQKPGQPPKRLISLVSKLDSGVPDRFSGSGSGTDFTLTISSLQAEDVAVYYCWQGTHFPGTFGGGTKVEIK

SEQ ID NO: 1359 - DNA, 738 bp, Artificial Sequence
  source: /note="Description of Artificial Sequence: Synthetic polynucleotide"
gaaatccagctggtccaatcgggagctgaggtcaagaagccgggagccaccgtcaagatctcatgcaaggggtcgggattcaacatcgaggactactacattcactgggtgcagcaagctccgggaaaaggcctggaatggatgggcagaatcgacccagaaaacgacgaaactaagtacggaccgattttccaaggaagagtgactatcaccgccgatacttcaaccaataccgtctacatggaactgagctcgctccggtccgaagatactgcagtgtattactgtgcctttcgcggaggggtgtactggggccaaggaactactgtcactgtctcgtcaggaggcggagggtcgggaggaggcgggagcggaggcggtggctcgggtggcggaggaagcgacgtggtgatgacccagtccccggactccctcgccgtgagcctcggagagagggcgactatcaattgcaagtcgtcccagtcacttctggattccgatggtaaaacgtacctcaactggctgcagcaaaagccagggcagccacccaaacggttgatctcccttgtgtccaaactggatagcggagtgcctgaccgcttctcgggttccggtagcgggaccgacttcaccctgacgatcagctcactgcaggcggaggacgtggcagtgtactactgctggcagggaacccacttccctggcacctttggaggtggcaccaaggtggagatcaag

SEQ ID NO: 1360 - DNA, 831 bp, Artificial Sequence
  source: /note="Description of Artificial Sequence: Synthetic polynucleotide"
atggccctccctgtcaccgccctgctgcttccgctggctcttctgctccacgccgctcggcccgaaatccagctggtccaatcgggagctgaggtcaagaagccgggagccaccgtcaagatctcatgcaaggggtcgggattcaacatcgaggactactacattcactgggtgcagcaagctccgggaaaaggcctggaatggatgggcagaatcgacccagaaaacgacgaaactaagtacggaccgattttccaaggaagagtgactatcaccgccgatacttcaaccaataccgtctacatggaactgagctcgctccggtccgaagatactgcagtgtattactgtgcctttcgcggaggggtgtactggggccaaggaactactgtcactgtctcgtcaggaggcggagggtcgggaggaggcgggagcggaggcggtggctcgggtggcggaggaagcgacgtggtgatgacccagtccccggactccctcgccgtgagcctcggagagagggcgactatcaattgcaagtcgtcccagtcacttctggattccgatggtaaaacgtacctcaactggctgcagcaaaagccagggcagccacccaaacggttgatctcccttgtgtccaaactggatagcggagtgcctgaccgcttctcgggttccggtagcgggaccgacttcaccctgacgatcagctcactgcaggcggaggacgtggcagtgtactactgctggcagggaacccacttccctggcacctttggaggtggcaccaaggtggagatcaagggatcgcaccaccatcaccatcatcatcac

SEQ ID NO: 1361 - protein, 277 aa, Artificial Sequence
  source: /note="Description of Artificial Sequence: Synthetic polypeptide"
MALPVTALLLPLALLLHAARPEIQLVQSGAEVKKPGATVKISCKGSGFNIEDYYIHWVQQAPGKGLEWMGRIDPENDETKYGPIFQGRVTITADTSTNTVYMELSSLRSEDTAVYYCAFRGGVYWGQGTTVTVSSGGGGSGGGGSGGGGSGGGGSDVVMTQSPDSLAVSLGERATINCKSSQSLLDSDGKTYLNWLQQKPGQPPKRLISLVSKLDSGVPDRFSGSGSGTDFTLTISSLQAEDVAVYYCWQGTHFPGTFGGGTKVEIKGSHHHHHHHH

SEQ ID NO: 1362 - DNA, 1470 bp, Artificial Sequence
  source: /note="Description of Artificial Sequence: Synthetic polynucleotide"
atggccctccctgtcaccgccctgctgcttccgctggctcttctgctccacgccgctcggcccgagatccagctggtgcagtcgggagctgaagtcaaaaagcctggcgcaaccgtcaagatctcgtgcaaaggatcagggttcaacatcgaggactactacatccattgggtgcaacaggcacccggaaaaggcctggagtggatggggaggattgacccagaaaatgacgaaaccaagtacggaccgatcttccaaggacgggtgaccatcacggctgacacttccactaacaccgtctacatggaactctcgagccttcgctcggaagataccgcggtgtactactgcgcctttagaggtggagtctactggggacaagggactaccgtcaccgtgtcgtcaggtggcggaggatcaggcggaggcggctccggtggaggaggaagcggaggaggtggctccgacgtggtgatgacgcagtcaccggactccttggcggtgagcctgggtgaacgcgccactatcaactgcaagagctcccagagcttgctggactccgatggaaagacttatctcaattggctgcaacagaagcctggccagccgccaaagagactcatctcactggtgagcaagctggatagcggagtgccagatcggttttcgggatcgggctcaggcaccgacttcaccctgactatttcctccctccaagccgaggatgtggccgtctactactgttggcaggggactcacttcccggggaccttcggtggaggcactaaggtggagatcaaaaccactaccccagcaccgaggccacccaccccggctcctaccatcgcctcccagcctctgtccctgcgtccggaggcatgtagacccgcagctggtggggccgtgcatacccggggtcttgacttcgcctgcgatatctacatttgggcccctctggctggtacttgcggggtcctgctgctttcactcgtgatcactctttactgtaagcgcggtcggaagaagctgctgtacatctttaagcaacccttcatgaggcctgtgcagactactcaagaggaggacggctgttcatgccggttcccagaggaggaggaaggcggctgcgaactgcgcgtgaaattcagccgcagcgcagatgctccagcctacaagcaggggcagaaccagctctacaacgaactcaatcttggtcggagagaggagtacgacgtgctggacaagcggagaggacgggacccagaaatgggcgggaagccgcgcagaaagaatccccaagagggcctgtacaacgagctccaaaaggataagatggcagaagcctatagcgagattggtatgaaaggggaacgcagaagaggcaaaggccacgacggactgtaccagggactcagcaccgccaccaaggacacctatgacgctcttcacatgcaggccctgccgcctcgg

SEQ ID NO: 1363 - protein, 490 aa, Artificial Sequence
  source: /note="Description of Artificial Sequence: Synthetic polypeptide"
MALPVTALLLPLALLLHAARPEIQLVQSGAEVKKPGATVKISCKGSGFNIEDYYIHWVQQAPGKGLEWMGRIDPENDETKYGPIFQGRVTITADTSTNTVYMELSSLRSEDTAVYYCAFRGGVYWGQGTTVTVSSGGGGSGGGGSGGGGSGGGGSDVVMTQSPDSLAVSLGERATINCKSSQSLLDSDGKTYLNWLQQKPGQPPKRLISLVSKLDSGVPDRFSGSGSGTDFTLTISSLQAEDVAVYYCWQGTHFPGTFGGGTKVEIKTTTPAPRPPTPAPTIASQPLSLRPEACRPAAGGAVHTRGLDFACDIYIWAPLAGTCGVLLLSLVITLYCKRGRKKLLYIFKQPFMRPVQTTQEEDGCSCRFPEEEEGGCELRVKFSRSADAPAYKQGQNQLYNELNLGRREEYDVLDKRRGRDPEMGGKPRRKNPQEGLYNELQKDKMAEAYSEIGMKGERRRGKGHDGLYQGLSTATKDTYDALHMQALPPR

SEQ ID NO: 1364 - protein, 246 aa, Artificial Sequence
  source: /note="Description of Artificial Sequence: Synthetic polypeptide"
DVVMTQSPDSLAVSLGERATINCKSSQSLLDSDGKTYLNWLQQKPGQPPKRLISLVSKLDSGVPDRFSGSGSGTDFTLTISSLQAEDVAVYYCWQGTHFPGTFGGGTKVEIKGGGGSGGGGSGGGGSGGGGSEIQLVQSGAEVKKPGATVKISCKGSGFNIEDYYIHWVQQAPGKGLEWMGRIDPENDETKYGPIFQGRVTITADTSTNTVYMELSSLRSEDTAVYYCAFRGGVYWGQGTTVTVSS

SEQ ID NO: 1365 - DNA, 738 bp, Artificial Sequence
  source: /note="Description of Artificial Sequence: Synthetic polynucleotide"
gatgtcgtgatgacccagtccccagactccctcgcagtgtccttgggagaacgggccaccatcaactgcaaatcgagccagtcactgctggactcagacggaaagacctacctcaactggctgcagcagaagcctggccagccaccgaagcgcctgatctccctggtgtccaagctggactcgggcgtcccggacaggtttagcggtagcggctcgggaaccgacttcactctgaccattagctcgctccaagctgaagatgtggcggtctactactgctggcaggggacccacttccccgggacctttggcggaggaactaaagtcgaaatcaaaggaggaggcggatcaggtggaggaggcagcggaggaggagggagcggcggtggcggctccgaaattcaacttgtgcaatccggtgccgaggtgaagaaacctggtgccactgtcaagatctcgtgtaagggatcgggattcaatatcgaggactactacatccactgggtgcaacaggcgccaggaaagggattggagtggatgggtcgcatcgacccggaaaacgatgagactaagtacggaccgatcttccaaggccgggtcacgatcactgcggatacctccactaataccgtgtatatggagctctcgtcactgagaagcgaagatacggccgtgtactactgcgcattcagaggaggtgtgtactggggccagggaactactgtgaccgtgtcgtcg

SEQ ID NO: 1366 - DNA, 831 bp, Artificial Sequence
  source: /note="Description of Artificial Sequence: Synthetic polynucleotide"
atggccctccctgtcaccgccctgctgcttccgctggctcttctgctccacgccgctcggcccgatgtcgtgatgacccagtccccagactccctcgcagtgtccttgggagaacgggccaccatcaactgcaaatcgagccagtcactgctggactcagacggaaagacctacctcaactggctgcagcagaagcctggccagccaccgaagcgcctgatctccctggtgtccaagctggactcgggcgtcccggacaggtttagcggtagcggctcgggaaccgacttcactctgaccattagctcgctccaagctgaagatgtggcggtctactactgctggcaggggacccacttccccgggacctttggcggaggaactaaagtcgaaatcaaaggaggaggcggatcaggtggaggaggcagcggaggaggagggagcggcggtggcggctccgaaattcaacttgtgcaatccggtgccgaggtgaagaaacctggtgccactgtcaagatctcgtgtaagggatcgggattcaatatcgaggactactacatccactgggtgcaacaggcgccaggaaagggattggagtggatgggtcgcatcgacccggaaaacgatgagactaagtacggaccgatcttccaaggccgggtcacgatcactgcggatacctccactaataccgtgtatatggagctctcgtcactgagaagcgaagatacggccgtgtactactgcgcattcagaggaggtgtgtactggggccagggaactactgtgaccgtgtcgtcggggtcacatcaccaccatcatcatcaccac

SEQ ID NO: 1367 - protein, 277 aa, Artificial Sequence
  source: /note="Description of Artificial Sequence: Synthetic polypeptide"
MALPVTALLLPLALLLHAARPDVVMTQSPDSLAVSLGERATINCKSSQSLLDSDGKTYLNWLQQKPGQPPKRLISLVSKLDSGVPDRFSGSGSGTDFTLTISSLQAEDVAVYYCWQGTHFPGTFGGGTKVEIKGGGGSGGGGSGGGGSGGGGSEIQLVQSGAEVKKPGATVKISCKGSGFNIEDYYIHWVQQAPGKGLEWMGRIDPENDETKYGPIFQGRVTITADTSTNTVYMELSSLRSEDTAVYYCAFRGGVYWGQGTTVTVSSGSHHHHHHHH

SEQ ID NO: 1368 - DNA, 1470 bp, Artificial Sequence
  source: /note="Description of Artificial Sequence: Synthetic polynucleotide"
atggccctccctgtcaccgccctgctgcttccgctggctcttctgctccacgccgctcggcccgacgtggtcatgactcaaagcccagattccttggctgtctcccttggagaaagagcaacgatcaattgcaaaagctcgcagtccctgttggactccgatggaaaaacctacctcaactggctgcagcagaagccgggacaaccaccaaagcggctgatttccctcgtgtccaagctggacagcggcgtgccggatcgcttctcgggcagcggctcgggaaccgattttactctcactatttcgtcactgcaagcggaggacgtggcggtgtattactgctggcagggcactcacttcccgggtacttttggtggaggtaccaaagtcgaaatcaagggtggaggcgggagcggaggaggcgggtcgggaggaggaggatcgggtggcggaggctcagaaatccagctggtgcagtcaggtgccgaagtgaagaagcctggggccacggtgaagatctcgtgcaaggggagcggattcaacatcgaggattactacatccattgggtgcaacaggcccctggcaaagggctggaatggatgggaaggatcgaccccgagaatgacgagactaagtacggcccgatcttccaaggacgggtgaccatcactgcagacacttcaaccaacaccgtctacatggaactctcctcgctgcgctccgaggacaccgccgtgtactactgtgctttcagaggaggagtctactggggacagggaacgaccgtgaccgtcagctcaaccactaccccagcaccgaggccacccaccccggctcctaccatcgcctcccagcctctgtccctgcgtccggaggcatgtagacccgcagctggtggggccgtgcatacccggggtcttgacttcgcctgcgatatctacatttgggcccctctggctggtacttgcggggtcctgctgctttcactcgtgatcactctttactgtaagcgcggtcggaagaagctgctgtacatctttaagcaacccttcatgaggcctgtgcagactactcaagaggaggacggctgttcatgccggttcccagaggaggaggaaggcggctgcgaactgcgcgtgaaattcagccgcagcgcagatgctccagcctacaagcaggggcagaaccagctctacaacgaactcaatcttggtcggagagaggagtacgacgtgctggacaagcggagaggacgggacccagaaatgggcgggaagccgcgcagaaagaatccccaagagggcctgtacaacgagctccaaaaggataagatggcagaagcctatagcgagattggtatgaaaggggaacgcagaagaggcaaaggccacgacggactgtaccagggactcagcaccgccaccaaggacacctatgacgctcttcacatgcaggccctgccgcctcgg

SEQ ID NO: 1369 - protein, 490 aa, Artificial Sequence
  source: /note="Description of Artificial Sequence: Synthetic polypeptide"
MALPVTALLLPLALLLHAARPDVVMTQSPDSLAVSLGERATINCKSSQSLLDSDGKTYLNWLQQKPGQPPKRLISLVSKLDSGVPDRFSGSGSGTDFTLTISSLQAEDVAVYYCWQGTHFPGTFGGGTKVEIKGGGGSGGGGSGGGGSGGGGSEIQLVQSGAEVKKPGATVKISCKGSGFNIEDYYIHWVQQAPGKGLEWMGRIDPENDETKYGPIFQGRVTITADTSTNTVYMELSSLRSEDTAVYYCAFRGGVYWGQGTTVTVSSTTTPAPRPPTPAPTIASQPLSLRPEACRPAAGGAVHTRGLDFACDIYIWAPLAGTCGVLLLSLVITLYCKRGRKKLLYIFKQPFMRPVQTTQEEDGCSCRFPEEEEGGCELRVKFSRSADAPAYKQGQNQLYNELNLGRREEYDVLDKRRGRDPEMGGKPRRKNPQEGLYNELQKDKMAEAYSEIGMKGERRRGKGHDGLYQGLSTATKDTYDALHMQALPPR

SEQ ID NO: 1370 - protein, 246 aa, Artificial Sequence
  source: /note="Description of Artificial Sequence: Synthetic polypeptide"
EIQLVQSGAEVKKPGESLRISCKGSGFNIEDYYIHWVRQMPGKGLEWMGRIDPENDETKYGPIFQGHVTISADTSINTVYLQWSSLKASDTAMYYCAFRGGVYWGQGTTVTVSSGGGGSGGGGSGGGGSGGGGSDVVMTQSPLSLPVTLGQPASISCKSSQSLLDSDGKTYLNWLQQRPGQSPRRLISLVSKLDSGVPDRFSGSGSGTDFTLKISRVEAEDVGVYYCWQGTHFPGTFGGGTKVEIK

SEQ ID NO: 1371 - DNA, 738 bp, Artificial Sequence
  source: /note="Description of Artificial Sequence: Synthetic polynucleotide"
gagattcagctggtccaaagcggcgcagaagtgaaaaagccaggggaatcgttgcgcatcagctgtaaaggttccggcttcaacatcgaggactattacatccattgggtgcggcagatgccaggaaaggggctggaatggatgggacggattgacccggagaacgacgaaaccaagtacggaccgatctttcaaggacacgtgactatctccgccgacaccagcatcaatacggtgtacctccaatggtcctcactcaaggcctcggataccgcgatgtactactgcgcgttcagaggaggcgtctactggggacaagggactactgtgactgtctcatcaggaggtggaggaagcggaggaggtggctcgggcggaggtggatcgggaggaggagggtccgatgtggtgatgacccagtccccactgtcgctcccggtgaccctcggacagcctgctagcatctcgtgcaaatcctcgcaatccctgctggactcggacggaaaaacgtacctcaattggctgcagcagcgccctggccagagcccgagaaggcttatctcgctggtgtcaaagctggatagcggtgtgcccgaccggttcagcggctcagggtcaggaaccgatttcaccttgaagatctcccgcgtggaagccgaagatgtcggagtctactactgctggcagggtactcacttcccggggacctttggtggcggcactaaggtcgagattaag

SEQ ID NO: 1372 - DNA, 831 bp, Artificial Sequence
  source: /note="Description of Artificial Sequence: Synthetic polynucleotide"
atggccctccctgtcaccgccctgctgcttccgctggctcttctgctccacgccgctcggcccgagattcagctggtccaaagcggcgcagaagtgaaaaagccaggggaatcgttgcgcatcagctgtaaaggttccggcttcaacatcgaggactattacatccattgggtgcggcagatgccaggaaaggggctggaatggatgggacggattgacccggagaacgacgaaaccaagtacggaccgatctttcaaggacacgtgactatctccgccgacaccagcatcaatacggtgtacctccaatggtcctcactcaaggcctcggataccgcgatgtactactgcgcgttcagaggaggcgtctactggggacaagggactactgtgactgtctcatcaggaggtggaggaagcggaggaggtggctcgggcggaggtggatcgggaggaggagggtccgatgtggtgatgacccagtccccactgtcgctcccggtgaccctcggacagcctgctagcatctcgtgcaaatcctcgcaatccctgctggactcggacggaaaaacgtacctcaattggctgcagcagcgccctggccagagcccgagaaggcttatctcgctggtgtcaaagctggatagcggtgtgcccgaccggttcagcggctcagggtcaggaaccgatttcaccttgaagatctcccgcgtggaagccgaagatgtcggagtctactactgctggcagggtactcacttcccggggacctttggtggcggcactaaggtcgagattaagggctcacaccatcatcaccatcaccaccac

SEQ ID NO: 1373 - protein, 277 aa, Artificial Sequence
  source: /note="Description of Artificial Sequence: Synthetic polypeptide"
MALPVTALLLPLALLLHAARPEIQLVQSGAEVKKPGESLRISCKGSGFNIEDYYIHWVRQMPGKGLEWMGRIDPENDETKYGPIFQGHVTISADTSINTVYLQWSSLKASDTAMYYCAFRGGVYWGQGTTVTVSSGGGGSGGGGSGGGGSGGGGSDVVMTQSPLSLPVTLGQPASISCKSSQSLLDSDGKTYLNWLQQRPGQSPRRLISLVSKLDSGVPDRFSGSGSGTDFTLKISRVEAEDVGVYYCWQGTHFPGTFGGGTKVEIKGSHHHHHHHH

SEQ ID NO: 1374 - DNA, 1470 bp, Artificial Sequence
  source: /note="Description of Artificial Sequence: Synthetic polynucleotide"
atggccctccctgtcaccgccctgctgcttccgctggctcttctgctccacgccgctcggcccgaaatccagctggtgcaaagcggagccgaggtgaagaagcccggagaatccctgcgcatctcgtgtaagggttccggctttaacatcgaggattactacatccactgggtgagacagatgccgggcaaaggtctggaatggatgggccgcatcgacccggagaacgacgaaaccaaatacggaccaatcttccaaggacatgtgactatttccgcggatacctccatcaacactgtctacttgcagtggagctcgctcaaggcgtcggataccgccatgtactactgcgcattcagaggaggtgtgtactggggccagggcactacggtcaccgtgtcctcgggaggtggagggtcaggaggcggaggctcgggcggtggaggatcaggcggaggaggaagcgatgtggtcatgactcaatccccactgtcactgcctgtcactctggggcaaccggcttccatctcatgcaagtcaagccaatcgctgctcgactccgacggaaaaacctacctcaattggcttcagcagcgcccaggccagtcgcctcggaggctgatctcactcgtgtcgaagcttgactccggggtgccggatcggtttagcggaagcggatcggggaccgacttcacgttgaagattagccgggtggaagccgaggacgtgggagtctattactgctggcaggggacccacttcccggggactttcggaggaggcaccaaagtcgagattaagaccactaccccagcaccgaggccacccaccccggctcctaccatcgcctcccagcctctgtccctgcgtccggaggcatgtagacccgcagctggtggggccgtgcatacccggggtcttgacttcgcctgcgatatctacatttgggcccctctggctggtacttgcggggtcctgctgctttcactcgtgatcactctttactgtaagcgcggtcggaagaagctgctgtacatctttaagcaacccttcatgaggcctgtgcagactactcaagaggaggacggctgttcatgccggttcccagaggaggaggaaggcggctgcgaactgcgcgtgaaattcagccgcagcgcagatgctccagcctacaagcaggggcagaaccagctctacaacgaactcaatcttggtcggagagaggagtacgacgtgctggacaagcggagaggacgggacccagaaatgggcgggaagccgcgcagaaagaatccccaagagggcctgtacaacgagctccaaaaggataagatggcagaagcctatagcgagattggtatgaaaggggaacgcagaagaggcaaaggccacgacggactgtaccagggactcagcaccgccaccaaggacacctatgacgctcttcacatgcaggccctgccgcctcgg

SEQ ID NO: 1375 - protein, 490 aa, Artificial Sequence
  source: /note="Description of Artificial Sequence: Synthetic polypeptide"
MALPVTALLLPLALLLHAARPEIQLVQSGAEVKKPGESLRISCKGSGFNIEDYYIHWVRQMPGKGLEWMGRIDPENDETKYGPIFQGHVTISADTSINTVYLQWSSLKASDTAMYYCAFRGGVYWGQGTTVTVSSGGGGSGGGGSGGGGSGGGGSDVVMTQSPLSLPVTLGQPASISCKSSQSLLDSDGKTYLNWLQQRPGQSPRRLISLVSKLDSGVPDRFSGSGSGTDFTLKISRVEAEDVGVYYCWQGTHFPGTFGGGTKVEIKTTTPAPRPPTPAPTIASQPLSLRPEACRPAAGGAVHTRGLDFACDIYIWAPLAGTCGVLLLSLVITLYCKRGRKKLLYIFKQPFMRPVQTTQEEDGCSCRFPEEEEGGCELRVKFSRSADAPAYKQGQNQLYNELNLGRREEYDVLDKRRGRDPEMGGKPRRKNPQEGLYNELQKDKMAEAYSEIGMKGERRRGKGHDGLYQGLSTATKDTYDALHMQALPPR

SEQ ID NO: 1376 - protein, 246 aa, Artificial Sequence
  source: /note="Description of Artificial Sequence: Synthetic polypeptide"
DVVMTQSPLSLPVTLGQPASISCKSSQSLLDSDGKTYLNWLQQRPGQSPRRLISLVSKLDSGVPDRFSGSGSGTDFTLKISRVEAEDVGVYYCWQGTHFPGTFGGGTKVEIKGGGGSGGGGSGGGGSGGGGSEIQLVQSGAEVKKPGESLRISCKGSGFNIEDYYIHWVRQMPGKGLEWMGRIDPENDETKYGPIFQGHVTISADTSINTVYLQWSSLKASDTAMYYCAFRGGVYWGQGTTVTVSS

SEQ ID NO: 1377 - DNA, 738 bp, Artificial Sequence
  source: /note="Description of Artificial Sequence: Synthetic polynucleotide"
gacgtcgtcatgacccagagcccgctgtcactgcctgtgaccctgggccagccggcgtccattagctgcaaatcctcgcaatccctgctcgactcagacggaaaaacgtacttgaactggctccaacagcgccctgggcaatccccaaggcggcttatctcactcgtcagcaagctcgatagcggtgtcccagacagattttcgggctcgggatcgggcactgatttcactctgaagatctcgcgggtggaagccgaggatgtgggagtgtactattgctggcagggcactcacttccccgggacgtttggcggaggaactaaggtcgagatcaaaggaggaggtggatcaggcggaggtgggagcggaggaggaggaagcggtggtggaggttccgaaatccagctggtgcaatcaggagccgaggtgaagaagccgggagaatccctgcgcatctcgtgcaagggctcgggcttcaacatcgaggattactacatccactgggtgcggcagatgccgggaaaggggttggaatggatgggacgcattgacccggaaaatgatgaaaccaaatacgggccaatcttccaaggccacgtgaccattagcgctgacacttccatcaacaccgtgtaccttcagtggtcctcactgaaggcgtcggacactgccatgtactactgtgcattcagaggaggggtctactggggacagggcaccaccgtgaccgtgagctcc

SEQ ID NO: 1378 - DNA, 831 bp, Artificial Sequence
  source: /note="Description of Artificial Sequence: Synthetic polynucleotide"
atggccctccctgtcaccgccctgctgcttccgctggctcttctgctccacgccgctcggcccgacgtcgtcatgacccagagcccgctgtcactgcctgtgaccctgggccagccggcgtccattagctgcaaatcctcgcaatccctgctcgactcagacggaaaaacgtacttgaactggctccaacagcgccctgggcaatccccaaggcggcttatctcactcgtcagcaagctcgatagcggtgtcccagacagattttcgggctcgggatcgggcactgatttcactctgaagatctcgcgggtggaagccgaggatgtgggagtgtactattgctggcagggcactcacttccccgggacgtttggcggaggaactaaggtcgagatcaaaggaggaggtggatcaggcggaggtgggagcggaggaggaggaagcggtggtggaggttccgaaatccagctggtgcaatcaggagccgaggtgaagaagccgggagaatccctgcgcatctcgtgcaagggctcgggcttcaacatcgaggattactacatccactgggtgcggcagatgccgggaaaggggttggaatggatgggacgcattgacccggaaaatgatgaaaccaaatacgggccaatcttccaaggccacgtgaccattagcgctgacacttccatcaacaccgtgtaccttcagtggtcctcactgaaggcgtcggacactgccatgtactactgtgcattcagaggaggggtctactggggacagggcaccaccgtgaccgtgagctccggctcgcatcaccatcatcaccaccatcac

SEQ ID NO: 1379 - protein, 277 aa, Artificial Sequence
  source: /note="Description of Artificial Sequence: Synthetic polypeptide"
MALPVTALLLPLALLLHAARPDVVMTQSPLSLPVTLGQPASISCKSSQSLLDSDGKTYLNWLQQRPGQSPRRLISLVSKLDSGVPDRFSGSGSGTDFTLKISRVEAEDVGVYYCWQGTHFPGTFGGGTKVEIKGGGGSGGGGSGGGGSGGGGSEIQLVQSGAEVKKPGESLRISCKGSGFNIEDYYIHWVRQMPGKGLEWMGRIDPENDETKYGPIFQGHVTISADTSINTVYLQWSSLKASDTAMYYCAFRGGVYWGQGTTVTVSSGSHHHHHHHH

SEQ ID NO: 1380 - DNA, 1470 bp, Artificial Sequence
  source: /note="Description of Artificial Sequence: Synthetic polynucleotide"
atggccctccctgtcaccgccctgctgcttccgctggctcttctgctccacgccgctcggcccgacgtcgtcatgacccaatcccctctctccctgccggtcaccctgggtcagccggcgtcgatctcatgcaaaagctcacagtccctgctggattcggacggaaaaacctacttgaactggctccaacagaggccgggtcagtcccctcgcagactgatctcgctggtgagcaagctcgactcgggtgtgccggatcggttctccgggtcaggatcgggcaccgactttacgctcaagatttcgagagtggaggccgaggatgtgggagtgtactattgctggcagggcacgcatttccccgggacctttggaggcgggactaaggtggaaatcaagggaggtggcggatcaggcggaggaggcagcggcggaggtggatcaggaggcggagggtcagagatccagctggtccaaagcggagcagaggtgaagaagccaggcgagtcccttcgcatttcgtgcaaagggagcggcttcaacattgaagattactacatccactgggtgcggcaaatgccaggaaagggtctggaatggatgggacggatcgacccagaaaatgatgaaactaagtacggaccgatcttccaaggacacgtcactatctccgcggacacttcgatcaacaccgtgtacctccagtggagcagcttgaaagcctccgacaccgctatgtactactgtgccttccgcggaggagtctactggggacaggggactactgtgaccgtgtcgtccaccactaccccagcaccgaggccacccaccccggctcctaccatcgcctcccagcctctgtccctgcgtccggaggcatgtagacccgcagctggtggggccgtgcatacccggggtcttgacttcgcctgcgatatctacatttgggcccctctggctggtacttgcggggtcctgctgctttcactcgtgatcactctttactgtaagcgcggtcggaagaagctgctgtacatctttaagcaacccttcatgaggcctgtgcagactactcaagaggaggacggctgttcatgccggttcccagaggaggaggaaggcggctgcgaactgcgcgtgaaattcagccgcagcgcagatgctccagcctacaagcaggggcagaaccagctctacaacgaactcaatcttggtcggagagaggagtacgacgtgctggacaagcggagaggacgggacccagaaatgggcgggaagccgcgcagaaagaatccccaagagggcctgtacaacgagctccaaaaggataagatggcagaagcctatagcgagattggtatgaaaggggaacgcagaagaggcaaaggccacgacggactgtaccagggactcagcaccgccaccaaggacacctatgacgctcttcacatgcaggccctgccgcctcgg

SEQ ID NO: 1381 - protein, 490 aa, Artificial Sequence
  source: /note="Description of Artificial Sequence: Synthetic polypeptide"
MALPVTALLLPLALLLHAARPDVVMTQSPLSLPVTLGQPASISCKSSQSLLDSDGKTYLNWLQQRPGQSPRRLISLVSKLDSGVPDRFSGSGSGTDFTLKISRVEAEDVGVYYCWQGTHFPGTFGGGTKVEIKGGGGSGGGGSGGGGSGGGGSEIQLVQSGAEVKKPGESLRISCKGSGFNIEDYYIHWVRQMPGKGLEWMGRIDPENDETKYGPIFQGHVTISADTSINTVYLQWSSLKASDTAMYYCAFRGGVYWGQGTTVTVSSTTTPAPRPPTPAPTIASQPLSLRPEACRPAAGGAVHTRGLDFACDIYIWAPLAGTCGVLLLSLVITLYCKRGRKKLLYIFKQPFMRPVQTTQEEDGCSCRFPEEEEGGCELRVKFSRSADAPAYKQGQNQLYNELNLGRREEYDVLDKRRGRDPEMGGKPRRKNPQEGLYNELQKDKMAEAYSEIGMKGERRRGKGHDGLYQGLSTATKDTYDALHMQALPPR

SEQ ID NO: 1382 - protein, 246 aa, Artificial Sequence
  source: /note="Description of Artificial Sequence: Synthetic polypeptide"
EIQLVQSGAEVKKPGATVKISCKGSGFNIEDYYIHWVQQAPGKGLEWMGRIDPENDETKYGPIFQGRVTITADTSTNTVYMELSSLRSEDTAVYYCAFRGGVYWGQGTTVTVSSGGGGSGGGGSGGGGSGGGGSDVVMTQSPLSLPVTLGQPASISCKSSQSLLDSDGKTYLNWLQQRPGQSPRRLISLVSKLDSGVPDRFSGSGSGTDFTLKISRVEAEDVGVYYCWQGTHFPGTFGGGTKVEIK

SEQ ID NO: 1383 - DNA, 738 bp, Artificial Sequence
  source: /note="Description of Artificial Sequence: Synthetic polynucleotide"
gaaatccagctcgtgcagagcggagccgaggtcaagaaaccgggtgctaccgtgaagatttcatgcaagggatcgggcttcaacatcgaggattactacatccactgggtgcagcaggcaccaggaaaaggacttgaatggatgggccggatcgacccggaaaatgacgagactaagtacggccctatcttccaaggacgggtgacgatcaccgcagacactagcaccaacaccgtctatatggaactctcgtccctgaggtccgaagatactgccgtgtactactgtgcgtttcgcggaggtgtgtactggggacagggtaccaccgtcaccgtgtcatcgggcggtggaggctccggtggaggagggtcaggaggcggtggaagcggaggaggcggcagcgacgtggtcatgactcaatcgccgctgtcgctgcccgtcactctgggacaacccgcgtccatcagctgcaaatcctcgcagtcactgcttgactccgatggaaagacctacctcaactggctgcagcaacgcccaggccaatccccaagacgcctgatctcgttggtgtcaaagctggactcaggggtgccggaccggttctccgggagcgggtcgggcacggatttcactctcaagatctccagagtggaagccgaggatgtgggagtctactactgctggcagggaacccatttccctggaacttttggcggaggaactaaggtcgagattaaa

SEQ ID NO: 1384 - DNA, 831 bp, Artificial Sequence
  source: /note="Description of Artificial Sequence: Synthetic polynucleotide"
atggccctccctgtcaccgccctgctgcttccgctggctcttctgctccacgccgctcggcccgaaatccagctcgtgcagagcggagccgaggtcaagaaaccgggtgctaccgtgaagatttcatgcaagggatcgggcttcaacatcgaggattactacatccactgggtgcagcaggcaccaggaaaaggacttgaatggatgggccggatcgacccggaaaatgacgagactaagtacggccctatcttccaaggacgggtgacgatcaccgcagacactagcaccaacaccgtctatatggaactctcgtccctgaggtccgaagatactgccgtgtactactgtgcgtttcgcggaggtgtgtactggggacagggtaccaccgtcaccgtgtcatcgggcggtggaggctccggtggaggagggtcaggaggcggtggaagcggaggaggcggcagcgacgtggtcatgactcaatcgccgctgtcgctgcccgtcactctgggacaacccgcgtccatcagctgcaaatcctcgcagtcactgcttgactccgatggaaagacctacctcaactggctgcagcaacgcccaggccaatccccaagacgcctgatctcgttggtgtcaaagctggactcaggggtgccggaccggttctccgggagcgggtcgggcacggatttcactctcaagatctccagagtggaagccgaggatgtgggagtctactactgctggcagggaacccatttccctggaacttttggcggaggaactaaggtcgagattaaagggagccaccatcatcatcaccaccaccac

SEQ ID NO: 1385 - protein, 277 aa, Artificial Sequence
  source: /note="Description of Artificial Sequence: Synthetic polypeptide"
MALPVTALLLPLALLLHAARPEIQLVQSGAEVKKPGATVKISCKGSGFNIEDYYIHWVQQAPGKGLEWMGRIDPENDETKYGPIFQGRVTITADTSTNTVYMELSSLRSEDTAVYYCAFRGGVYWGQGTTVTVSSGGGGSGGGGSGGGGSGGGGSDVVMTQSPLSLPVTLGQPASISCKSSQSLLDSDGKTYLNWLQQRPGQSPRRLISLVSKLDSGVPDRFSGSGSGTDFTLKISRVEAEDVGVYYCWQGTHFPGTFGGGTKVEIKGSHHHHHHHH

SEQ ID NO: 1386 - DNA, 1470 bp, Artificial Sequence
  source: /note="Description of Artificial Sequence: Synthetic polynucleotide"
atggccctccctgtcaccgccctgctgcttccgctggctcttctgctccacgccgctcggcccgaaatccagctcgtgcagagcggagccgaggtcaagaaaccgggtgctaccgtgaagatttcatgcaagggatcgggcttcaacatcgaggattactacatccactgggtgcagcaggcaccaggaaaaggacttgaatggatgggccggatcgacccggaaaatgacgagactaagtacggccctatcttccaaggacgggtgacgatcaccgcagacactagcaccaacaccgtctatatggaactctcgtccctgaggtccgaagatactgccgtgtactactgtgcgtttcgcggaggtgtgtactggggacagggtaccaccgtcaccgtgtcatcgggcggtggaggctccggtggaggagggtcaggaggcggtggaagcggaggaggcggcagcgacgtggtcatgactcaatcgccgctgtcgctgcccgtcactctgggacaacccgcgtccatcagctgcaaatcctcgcagtcactgcttgactccgatggaaagacctacctcaactggctgcagcaacgcccaggccaatccccaagacgcctgatctcgttggtgtcaaagctggactcaggggtgccggaccggttctccgggagcgggtcgggcacggatttcactctcaagatctccagagtggaagccgaggatgtgggagtctactactgctggcagggaacccatttccctggaacttttggcggaggaactaaggtcgagattaaaaccactaccccagcaccgaggccacccaccccggctcctaccatcgcctcccagcctctgtccctgcgtccggaggcatgtagacccgcagctggtggggccgtgcatacccggggtcttgacttcgcctgcgatatctacatttgggcccctctggctggtacttgcggggtcctgctgctttcactcgtgatcactctttactgtaagcgcggtcggaagaagctgctgtacatctttaagcaacccttcatgaggcctgtgcagactactcaagaggaggacggctgttcatgccggttcccagaggaggaggaaggcggctgcgaactgcgcgtgaaattcagccgcagcgcagatgctccagcctacaagcaggggcagaaccagctctacaacgaactcaatcttggtcggagagaggagtacgacgtgctggacaagcggagaggacgggacccagaaatgggcgggaagccgcgcagaaagaatccccaagagggcctgtacaacgagctccaaaaggataagatggcagaagcctatagcgagattggtatgaaaggggaacgcagaagaggcaaaggccacgacggactgtaccagggactcagcaccgccaccaaggacacctatgacgctcttcacatgcaggccctgccgcctcgg

SEQ ID NO: 1387 - protein, 490 aa, Artificial Sequence
  source: /note="Description of Artificial Sequence: Synthetic polypeptide"
MALPVTALLLPLALLLHAARPEIQLVQSGAEVKKPGATVKISCKGSGFNIEDYYIHWVQQAPGKGLEWMGRIDPENDETKYGPIFQGRVTITADTSTNTVYMELSSLRSEDTAVYYCAFRGGVYWGQGTTVTVSSGGGGSGGGGSGGGGSGGGGSDVVMTQSPLSLPVTLGQPASISCKSSQSLLDSDGKTYLNWLQQRPGQSPRRLISLVSKLDSGVPDRFSGSGSGTDFTLKISRVEAEDVGVYYCWQGTHFPGTFGGGTKVEIKTTTPAPRPPTPAPTIASQPLSLRPEACRPAAGGAVHTRGLDFACDIYIWAPLAGTCGVLLLSLVITLYCKRGRKKLLYIFKQPFMRPVQTTQEEDGCSCRFPEEEEGGCELRVKFSRSADAPAYKQGQNQLYNELNLGRREEYDVLDKRRGRDPEMGGKPRRKNPQEGLYNELQKDKMAEAYSEIGMKGERRRGKGHDGLYQGLSTATKDTYDALHMQALPPR

SEQ ID NO: 1388 - protein, 246 aa, Artificial Sequence
  source: /note="Description of Artificial Sequence: Synthetic polypeptide"
EIQLVQSGAEVKKPGESLRISCKGSGFNIEDYYIHWVRQMPGKGLEWMGRIDPENDETKYGPIFQGHVTISADTSINTVYLQWSSLKASDTAMYYCAFRGGVYWGQGTTVTVSSGGGGSGGGGSGGGGSGGGGSDVVMTQSPDSLAVSLGERATINCKSSQSLLDSDGKTYLNWLQQKPGQPPKRLISLVSKLDSGVPDRFSGSGSGTDFTLTISSLQAEDVAVYYCWQGTHFPGTFGGGTKVEIK

SEQ ID NO: 1389 - DNA, 738 bp, Artificial Sequence
  source: /note="Description of Artificial Sequence: Synthetic polynucleotide"
gaaatccagctggtgcagtcaggcgccgaggtcaagaagccgggagagtcgctgagaatctcgtgcaagggctcggggttcaacatcgaggactactacattcactgggtcaggcagatgccgggaaagggactggaatggatgggccggatcgacccagaaaatgacgaaaccaaatacgggccgatttttcaaggccacgtgactatcagcgcagacacgagcatcaacactgtctacctccagtggtcctcgcttaaggccagcgataccgctatgtactactgcgcattcagaggcggggtgtactggggacaaggaaccactgtgaccgtgagcagcggaggtggcggctcgggaggaggtgggagcggaggaggaggttccggcggtggaggatcagatgtcgtgatgacccagtccccggactccctcgctgtctcactgggcgagcgcgcgaccatcaactgcaaatcgagccagtcgctgttggactccgatggaaagacttatctgaattggctgcaacagaaaccaggacaacctcccaagcggctcatctcgcttgtgtcaaaactcgattcgggagtgccagaccgcttctcggggtccgggagcggaactgactttactttgaccatttcctcactgcaagcggaggatgtggccgtgtattactgttggcagggcacgcatttccctggaaccttcggtggcggaactaaggtggaaatcaag

SEQ ID NO: 1390 - DNA, 834 bp, Artificial Sequence
  source: /note="Description of Artificial Sequence: Synthetic polynucleotide"
atggccctccctgtcaccgccctgctgcttccgctggctcttctgctccacgccgctcggcccgaaatccagctggtgcagtcaggcgccgaggtcaagaagccgggagagtcgctgagaatctcgtgcaagggctcggggttcaacatcgaggactactacattcactgggtcaggcagatgccgggaaagggactggaatggatgggccggatcgacccagaaaatgacgaaaccaaatacgggccgatttttcaaggccacgtgactatcagcgcagacacgagcatcaacactgtctacctccagtggtcctcgcttaaggccagcgataccgctatgtactactgcgcattcagaggcggggtgtactggggacaaggaaccactgtgaccgtgagcagcggaggtggcggctcgggaggaggtgggagcggaggaggaggttccggcggtggaggatcagatgtcgtgatgacccagtccccggactccctcgctgtctcactgggcgagcgcgcgaccatcaactgcaaatcgagccagtcgctgttggactccgatggaaagacttatctgaattggctgcaacagaaaccaggacaacctcccaagcggctcatctcgcttgtgtcaaaactcgattcgggagtgccagaccgcttctcggggtccgggagcggaactgactttactttgaccatttcctcactgcaagcggaggatgtggccgtgtattactgttggcagggcacgcatttccctggaaccttcggtggcggaactaaggtggaaatcaagggatcacaccaccatcatcaccatcaccaccat

SEQ ID NO: 1391 - protein, 278 aa, Artificial Sequence
  source: /note="Description of Artificial Sequence: Synthetic polypeptide"
MALPVTALLLPLALLLHAARPEIQLVQSGAEVKKPGESLRISCKGSGFNIEDYYIHWVRQMPGKGLEWMGRIDPENDETKYGPIFQGHVTISADTSINTVYLQWSSLKASDTAMYYCAFRGGVYWGQGTTVTVSSGGGGSGGGGSGGGGSGGGGSDVVMTQSPDSLAVSLGERATINCKSSQSLLDSDGKTYLNWLQQKPGQPPKRLISLVSKLDSGVPDRFSGSGSGTDFTLTISSLQAEDVAVYYCWQGTHFPGTFGGGTKVEIKGSHHHHHHHHH

SEQ ID NO: 1392 - DNA, 1470 bp, Artificial Sequence
  source: /note="Description of Artificial Sequence: Synthetic polynucleotide"
atggccctccctgtcaccgccctgctgcttccgctggctcttctgctccacgccgctcggcccgagattcagctcgtgcaatcgggagcggaagtcaagaagccaggagagtccttgcggatctcatgcaagggtagcggctttaacatcgaggattactacatccactgggtgaggcagatgccggggaagggactcgaatggatgggacggatcgacccagaaaacgacgaaactaagtacggtccgatcttccaaggccatgtgactattagcgccgatacttcaatcaataccgtgtatctgcaatggtcctcattgaaagcctcagataccgcgatgtactactgtgctttcagaggaggggtctactggggacagggaactaccgtgactgtctcgtccggcggaggcgggtcaggaggtggcggcagcggaggaggagggtccggcggaggtgggtccgacgtcgtgatgacccagagccctgacagcctggcagtgagcctgggcgaaagagctaccattaactgcaaatcgtcgcagagcctgctggactcggacggaaaaacgtacctcaattggctgcagcaaaagcctggccagccaccgaagcgccttatctcactggtgtcgaagctggattcgggagtgcccgatcgcttctccggctcgggatcgggtactgacttcaccctcactatctcctcgcttcaagcagaggacgtggccgtctactactgctggcagggaacccactttccgggaaccttcggcggagggacgaaagtggagatcaagaccactaccccagcaccgaggccacccaccccggctcctaccatcgcctcccagcctctgtccctgcgtccggaggcatgtagacccgcagctggtggggccgtgcatacccggggtcttgacttcgcctgcgatatctacatttgggcccctctggctggtacttgcggggtcctgctgctttcactcgtgatcactctttactgtaagcgcggtcggaagaagctgctgtacatctttaagcaacccttcatgaggcctgtgcagactactcaagaggaggacggctgttcatgccggttcccagaggaggaggaaggcggctgcgaactgcgcgtgaaattcagccgcagcgcagatgctccagcctacaagcaggggcagaaccagctctacaacgaactcaatcttggtcggagagaggagtacgacgtgctggacaagcggagaggacgggacccagaaatgggcgggaagccgcgcagaaagaatccccaagagggcctgtacaacgagctccaaaaggataagatggcagaagcctatagcgagattggtatgaaaggggaacgcagaagaggcaaaggccacgacggactgtaccagggactcagcaccgccaccaaggacacctatgacgctcttcacatgcaggccctgccgcctcgg

SEQ ID NO: 1393 - protein, 490 aa, Artificial Sequence
  source: /note="Description of Artificial Sequence: Synthetic polypeptide"
MALPVTALLLPLALLLHAARPEIQLVQSGAEVKKPGESLRISCKGSGFNIEDYYIHWVRQMPGKGLEWMGRIDPENDETKYGPIFQGHVTISADTSINTVYLQWSSLKASDTAMYYCAFRGGVYWGQGTTVTVSSGGGGSGGGGSGGGGSGGGGSDVVMTQSPDSLAVSLGERATINCKSSQSLLDSDGKTYLNWLQQKPGQPPKRLISLVSKLDSGVPDRFSGSGSGTDFTLTISSLQAEDVAVYYCWQGTHFPGTFGGGTKVEIKTTTPAPRPPTPAPTIASQPLSLRPEACRPAAGGAVHTRGLDFACDIYIWAPLAGTCGVLLLSLVITLYCKRGRKKLLYIFKQPFMRPVQTTQEEDGCSCRFPEEEEGGCELRVKFSRSADAPAYKQGQNQLYNELNLGRREEYDVLDKRRGRDPEMGGKPRRKNPQEGLYNELQKDKMAEAYSEIGMKGERRRGKGHDGLYQGLSTATKDTYDALHMQALPPR

SEQ ID NO: 1394 - protein, 246 aa, Artificial Sequence
  source: /note="Description of Artificial Sequence: Synthetic polypeptide"
DVVMTQSPDSLAVSLGERATINCKSSQSLLDSDGKTYLNWLQQKPGQPPKRLISLVSKLDSGVPDRFSGSGSGTDFTLTISSLQAEDVAVYYCWQGTHFPGTFGGGTKVEIKGGGGSGGGGSGGGGSGGGGSEIQLVQSGAEVKKPGESLRISCKGSGFNIEDYYIHWVRQMPGKGLEWMGRIDPENDETKYGPIFQGHVTISADTSINTVYLQWSSLKASDTAMYYCAFRGGVYWGQGTTVTVSS

SEQ ID NO: 1395 - DNA, 738 bp, Artificial Sequence
  source: /note="Description of Artificial Sequence: Synthetic polynucleotide"
gacgtggtgatgacccaatcgccagattccctggcagtgtccctgggcgaacgcgccactattaactgcaaatcgtcacagtccttgcttgattccgacggaaagacctacctcaattggctccagcagaagccaggacaaccgccaaagagactgatctccctggtgtcaaagctggactcgggagtgcctgatcggttctcgggtagcgggagcggcaccgacttcactctgaccatctcgtcactccaggctgaggacgtggccgtgtattactgttggcagggtactcactttccgggcactttcggaggcggcaccaaggtggagattaaaggaggaggcggaagcggaggtggaggatcgggaggtggtgggagcggcggaggagggagcgagatccagctcgtccaatcgggagcggaagtgaagaagcccggagagtcacttagaatctcatgcaaggggtcgggcttcaacatcgaggattactacatccattgggtccgccagatgcctggtaaaggactggaatggatggggaggattgacccggaaaacgacgaaactaagtacggaccgatctttcaagggcacgtgactatctccgctgatacctcaatcaatactgtctacctccagtggtcctcgctgaaagcaagcgacaccgcgatgtactactgcgccttccggggaggagtgtactggggccaaggcaccacggtcacggtcagctcc

SEQ ID NO: 1396 - DNA, 834 bp, Artificial Sequence
  source: /note="Description of Artificial Sequence: Synthetic polynucleotide"
atggccctccctgtcaccgccctgctgcttccgctggctcttctgctccacgccgctcggcccgacgtggtgatgacccaatcgccagattccctggcagtgtccctgggcgaacgcgccactattaactgcaaatcgtcacagtccttgcttgattccgacggaaagacctacctcaattggctccagcagaagccaggacaaccgccaaagagactgatctccctggtgtcaaagctggactcgggagtgcctgatcggttctcgggtagcgggagcggcaccgacttcactctgaccatctcgtcactccaggctgaggacgtggccgtgtattactgttggcagggtactcactttccgggcactttcggaggcggcaccaaggtggagattaaaggaggaggcggaagcggaggtggaggatcgggaggtggtgggagcggcggaggagggagcgagatccagctcgtccaatcgggagcggaagtgaagaagcccggagagtcacttagaatctcatgcaaggggtcgggcttcaacatcgaggattactacatccattgggtccgccagatgcctggtaaaggactggaatggatggggaggattgacccggaaaacgacgaaactaagtacggaccgatctttcaagggcacgtgactatctccgctgatacctcaatcaatactgtctacctccagtggtcctcgctgaaagcaagcgacaccgcgatgtactactgcgccttccggggaggagtgtactggggccaaggcaccacggtcacggtcagctccggctcccatcaccaccaccatcaccatcatcac

SEQ ID NO: 1397 - protein, 278 aa, Artificial Sequence
  source: /note="Description of Artificial Sequence: Synthetic polypeptide"
MALPVTALLLPLALLLHAARPDVVMTQSPDSLAVSLGERATINCKSSQSLLDSDGKTYLNWLQQKPGQPPKRLISLVSKLDSGVPDRFSGSGSGTDFTLTISSLQAEDVAVYYCWQGTHFPGTFGGGTKVEIKGGGGSGGGGSGGGGSGGGGSEIQLVQSGAEVKKPGESLRISCKGSGFNIEDYYIHWVRQMPGKGLEWMGRIDPENDETKYGPIFQGHVTISADTSINTVYLQWSSLKASDTAMYYCAFRGGVYWGQGTTVTVSSGSHHHHHHHHH

SEQ ID NO: 1398 - DNA, 1470 bp, Artificial Sequence
  source: /note="Description of Artificial Sequence: Synthetic polynucleotide"
atggccctccctgtcaccgccctgctgcttccgctggctcttctgctccacgccgctcggcccgacgtggtgatgactcagtcgcctgactcgctggctgtgtcccttggagagcgggccactatcaattgcaagtcatcccagtcgctgctggattccgacgggaaaacctacctcaattggctgcagcaaaaaccgggacagcctccaaagcggctcatcagcctggtgtccaagttggacagcggcgtgccagaccgcttctccggttcgggaagcggtactgatttcacgctgaccatctcatccctccaagcggaggatgtggcagtctactactgttggcagggcacgcattttccgggcacttttggaggagggaccaaggtcgaaatcaagggaggaggtggctcgggcggaggaggctcgggaggaggaggatcaggaggcggtggaagcgagattcaactggtccagagcggcgcagaagtcaagaagccgggtgaatcgctcagaatctcgtgcaaaggatcgggattcaacatcgaggactactacattcactgggtcagacaaatgccgggcaaagggctggaatggatggggaggatcgaccccgaaaacgatgaaaccaagtacggaccaatcttccaagggcacgtgaccatttcggcggacacctcaatcaacactgtgtacctccagtggagctcacttaaggccagcgataccgccatgtactattgcgctttccgcggaggggtgtactggggacagggcactactgtgaccgtgtcatccaccactaccccagcaccgaggccacccaccccggctcctaccatcgcctcccagcctctgtccctgcgtccggaggcatgtagacccgcagctggtggggccgtgcatacccggggtcttgacttcgcctgcgatatctacatttgggcccctctggctggtacttgcggggtcctgctgctttcactcgtgatcactctttactgtaagcgcggtcggaagaagctgctgtacatctttaagcaacccttcatgaggcctgtgcagactactcaagaggaggacggctgttcatgccggttcccagaggaggaggaaggcggctgcgaactgcgcgtgaaattcagccgcagcgcagatgctccagcctacaagcaggggcagaaccagctctacaacgaactcaatcttggtcggagagaggagtacgacgtgctggacaagcggagaggacgggacccagaaatgggcgggaagccgcgcagaaagaatccccaagagggcctgtacaacgagctccaaaaggataagatggcagaagcctatagcgagattggtatgaaaggggaacgcagaagaggcaaaggccacgacggactgtaccagggactcagcaccgccaccaaggacacctatgacgctcttcacatgcaggccctgccgcctcgg

SEQ ID NO: 1399 - protein, 490 aa, Artificial Sequence
  source: /note="Description of Artificial Sequence: Synthetic polypeptide"
MALPVTALLLPLALLLHAARPDVVMTQSPDSLAVSLGERATINCKSSQSLLDSDGKTYLNWLQQKPGQPPKRLISLVSKLDSGVPDRFSGSGSGTDFTLTISSLQAEDVAVYYCWQGTHFPGTFGGGTKVEIKGGGGSGGGGSGGGGSGGGGSEIQLVQSGAEVKKPGESLRISCKGSGFNIEDYYIHWVRQMPGKGLEWMGRIDPENDETKYGPIFQGHVTISADTSINTVYLQWSSLKASDTAMYYCAFRGGVYWGQGTTVTVSSTTTPAPRPPTPAPTIASQPLSLRPEACRPAAGGAVHTRGLDFACDIYIWAPLAGTCGVLLLSLVITLYCKRGRKKLLYIFKQPFMRPVQTTQEEDGCSCRFPEEEEGGCELRVKFSRSADAPAYKQGQNQLYNELNLGRREEYDVLDKRRGRDPEMGGKPRRKNPQEGLYNELQKDKMAEAYSEIGMKGERRRGKGHDGLYQGLSTATKDTYDALHMQALPPR

SEQ ID NO: 1400 - protein, 246 aa, Artificial Sequence
  source: /note="Description of Artificial Sequence: Synthetic polypeptide"
DVVMTQSPLSLPVTLGQPASISCKSSQSLLDSDGKTYLNWLQQRPGQSPRRLISLVSKLDSGVPDRFSGSGSGTDFTLKISRVEAEDVGVYYCWQGTHFPGTFGGGTKVEIKGGGGSGGGGSGGGGSGGGGSEIQLVQSGAEVKKPGATVKISCKGSGFNIEDYYIHWVQQAPGKGLEWMGRIDPENDETKYGPIFQGRVTITADTSTNTVYMELSSLRSEDTAVYYCAFRGGVYWGQGTTVTVSS

SEQ ID NO: 1401 - DNA, 738 bp, Artificial Sequence
  source: /note="Description of Artificial Sequence: Synthetic polynucleotide"
gatgtggtcatgacgcagtcaccactgtccctccccgtgacccttggacagccagcgtcgattagctgcaagtcatcccaatccctgctcgattcggatggaaagacctatctcaactggctgcagcaaagacccggtcagagccctaggagactcatctcgttggtgtcaaagctggacagcggagtgccggaccggttttccggttcgggatcggggacggacttcactctgaagatttcacgggtggaagctgaggatgtgggagtgtactactgctggcagggaacccatttccctggcacttttggcggaggaactaaggtcgaaatcaagggaggaggtggctcgggaggaggcggatcgggcggaggcgggagcggcggaggagggtccgaaatccaacttgtccagtcaggagccgaagtgaagaaaccgggagccaccgtcaaaatcagctgtaagggatcgggattcaatatcgaggactactacatccactgggtgcagcaagctccgggcaaaggactggagtggatggggcgcatcgacccagagaacgacgaaaccaaatacggcccgatcttccaagggcgggtgaccatcaccgcggacacctcaactaacactgtgtacatggagctgagctccctgcgctccgaagatactgcagtctactactgcgccttccgcggtggtgtgtactggggacagggcaccactgtgactgtcagctcg

SEQ ID NO: 1402 - DNA, 831 bp, Artificial Sequence
  source: /note="Description of Artificial Sequence: Synthetic polynucleotide"
atggccctccctgtcaccgccctgctgcttccgctggctcttctgctccacgccgctcggcccgatgtggtcatgacgcagtcaccactgtccctccccgtgacccttggacagccagcgtcgattagctgcaagtcatcccaatccctgctcgattcggatggaaagacctatctcaactggctgcagcaaagacccggtcagagccctaggagactcatctcgttggtgtcaaagctggacagcggagtgccggaccggttttccggttcgggatcggggacggacttcactctgaagatttcacgggtggaagctgaggatgtgggagtgtactactgctggcagggaacccatttccctggcacttttggcggaggaactaaggtcgaaatcaagggaggaggtggctcgggaggaggcggatcgggcggaggcgggagcggcggaggagggtccgaaatccaacttgtccagtcaggagccgaagtgaagaaaccgggagccaccgtcaaaatcagctgtaagggatcgggattcaatatcgaggactactacatccactgggtgcagcaagctccgggcaaaggactggagtggatggggcgcatcgacccagagaacgacgaaaccaaatacggcccgatcttccaagggcgggtgaccatcaccgcggacacctcaactaacactgtgtacatggagctgagctccctgcgctccgaagatactgcagtctactactgcgccttccgcggtggtgtgtactggggacagggcaccactgtgactgtcagctcggggtcccaccatcatcaccaccaccatcac

SEQ ID NO: 1403 - protein, 277 aa, Artificial Sequence
  source: /note="Description of Artificial Sequence: Synthetic polypeptide"
MALPVTALLLPLALLLHAARPDVVMTQSPLSLPVTLGQPASISCKSSQSLLDSDGKTYLNWLQQRPGQSPRRLISLVSKLDSGVPDRFSGSGSGTDFTLKISRVEAEDVGVYYCWQGTHFPGTFGGGTKVEIKGGGGSGGGGSGGGGSGGGGSEIQLVQSGAEVKKPGATVKISCKGSGFNIEDYYIHWVQQAPGKGLEWMGRIDPENDETKYGPIFQGRVTITADTSTNTVYMELSSLRSEDTAVYYCAFRGGVYWGQGTTVTVSSGSHHHHHHHH

SEQ ID NO: 1404 - DNA, 1470 bp, Artificial Sequence
  source: /note="Description of Artificial Sequence: Synthetic polynucleotide"
atggccctccctgtcaccgccctgctgcttccgctggctcttctgctccacgccgctcggcccgatgtggtcatgacgcagtcaccactgtccctccccgtgacccttggacagccagcgtcgattagctgcaagtcatcccaatccctgctcgattcggatggaaagacctatctcaactggctgcagcaaagacccggtcagagccctaggagactcatctcgttggtgtcaaagctggacagcggagtgccggaccggttttccggttcgggatcggggacggacttcactctgaagatttcacgggtggaagctgaggatgtgggagtgtactactgctggcagggaacccatttccctggcacttttggcggaggaactaaggtcgaaatcaagggaggaggtggctcgggaggaggcggatcgggcggaggcgggagcggcggaggagggtccgaaatccaacttgtccagtcaggagccgaagtgaagaaaccgggagccaccgtcaaaatcagctgtaagggatcgggattcaatatcgaggactactacatccactgggtgcagcaagctccgggcaaaggactggagtggatggggcgcatcgacccagagaacgacgaaaccaaatacggcccgatcttccaagggcgggtgaccatcaccgcggacacctcaactaacactgtgtacatggagctgagctccctgcgctccgaagatactgcagtctactactgcgccttccgcggtggtgtgtactggggacagggcaccactgtgactgtcagctcgaccactaccccagcaccgaggccacccaccccggctcctaccatcgcctcccagcctctgtccctgcgtccggaggcatgtagacccgcagctggtggggccgtgcatacccggggtcttgacttcgcctgcgatatctacatttgggcccctctggctggtacttgcggggtcctgctgctttcactcgtgatcactctttactgtaagcgcggtcggaagaagctgctgtacatctttaagcaacccttcatgaggcctgtgcagactactcaagaggaggacggctgttcatgccggttcccagaggaggaggaaggcggctgcgaactgcgcgtgaaattcagccgcagcgcagatgctccagcctacaagcaggggcagaaccagctctacaacgaactcaatcttggtcggagagaggagtacgacgtgctggacaagcggagaggacgggacccagaaatgggcgggaagccgcgcagaaagaatccccaagagggcctgtacaacgagctccaaaaggataagatggcagaagcctatagcgagattggtatgaaaggggaacgcagaagaggcaaaggccacgacggactgtaccagggactcagcaccgccaccaaggacacctatgacgctcttcacatgcaggccctgccgcctcgg

SEQ ID NO: 1405 - protein, 490 aa, Artificial Sequence
  source: /note="Description of Artificial Sequence: Synthetic polypeptide"
MALPVTALLLPLALLLHAARPDVVMTQSPLSLPVTLGQPASISCKSSQSLLDSDGKTYLNWLQQRPGQSPRRLISLVSKLDSGVPDRFSGSGSGTDFTLKISRVEAEDVGVYYCWQGTHFPGTFGGGTKVEIKGGGGSGGGGSGGGGSGGGGSEIQLVQSGAEVKKPGATVKISCKGSGFNIEDYYIHWVQQAPGKGLEWMGRIDPENDETKYGPIFQGRVTITADTSTNTVYMELSSLRSEDTAVYYCAFRGGVYWGQGTTVTVSSTTTPAPRPPTPAPTIASQPLSLRPEACRPAAGGAVHTRGLDFACDIYIWAPLAGTCGVLLLSLVITLYCKRGRKKLLYIFKQPFMRPVQTTQEEDGCSCRFPEEEEGGCELRVKFSRSADAPAYKQGQNQLYNELNLGRREEYDVLDKRRGRDPEMGGKPRRKNPQEGLYNELQKDKMAEAYSEIGMKGERRRGKGHDGLYQGLSTATKDTYDALHMQALPPR

SEQ ID NO: 1406 - protein, 243 aa, Artificial Sequence
  source: /note="Description of Artificial Sequence: Synthetic polypeptide"
EIQLQQSGAELVKPGASVKLSCTGSGFNIEDYYIHWVKQRTEQGLEWIGRIDPENDETKYGPIFQGRATITADTSSNTVYLQLSSLTSEDTAVYYCAFRGGVYWGPGTTLTVSSGGGGSGGGGSGGGGSHMDVVMTQSPLTLSVAIGQSASISCKSSQSLLDSDGKTYLNWLLQRPGQSPKRLISLVSKLDSGVPDRFTGSGSGTDFTLRISRVEAEDLGIYYCWQGTHFPGTFGGGTKLEIK

SEQ ID NO: 1407 - DNA, 729 bp, Artificial Sequence
  source: /note="Description of Artificial Sequence: Synthetic polynucleotide"
gagatccagctccaacagagcggagccgaactggtcaaaccgggagcgtcggtgaagttgtcatgcactggatcgggcttcaacatcgaggattactacatccactgggtcaagcaacgcaccgagcaggggctggaatggatcggacggatcgaccccgaaaacgatgaaaccaagtacgggcctatcttccaaggacgggccaccattacggctgacacgtcaagcaataccgtctacctccagctttccagcctgacctccgaggacactgccgtgtactactgcgccttcagaggaggcgtgtactggggaccaggaaccactttgaccgtgtccagcggaggcggtggatcaggaggaggaggctcaggcggtggcggctcgcacatggacgtggtcatgactcagtccccgctgaccctgtcggtggcaattggacagagcgcatccatctcgtgcaagagctcacagtcgctgctggattccgacggaaagacttatctgaactggctgctccaaagaccagggcaatcaccgaaacgccttatctccctggtgtcgaaactcgactcgggtgtgccggatcggtttaccggtagcgggtccggcacggacttcactctccgcatttcgagggtggaagcggaggatctcgggatctactactgttggcagggaacccacttccctgggacttttggaggcggaactaagctggaaatcaag

SEQ ID NO: 1408 - DNA, 822 bp, Artificial Sequence
  source: /note="Description of Artificial Sequence: Synthetic polynucleotide"
atggccctccctgtcaccgccctgctgcttccgctggctcttctgctccacgccgctcggcccgagatccagctccaacagagcggagccgaactggtcaaaccgggagcgtcggtgaagttgtcatgcactggatcgggcttcaacatcgaggattactacatccactgggtcaagcaacgcaccgagcaggggctggaatggatcggacggatcgaccccgaaaacgatgaaaccaagtacgggcctatcttccaaggacgggccaccattacggctgacacgtcaagcaataccgtctacctccagctttccagcctgacctccgaggacactgccgtgtactactgcgccttcagaggaggcgtgtactggggaccaggaaccactttgaccgtgtccagcggaggcggtggatcaggaggaggaggctcaggcggtggcggctcgcacatggacgtggtcatgactcagtccccgctgaccctgtcggtggcaattggacagagcgcatccatctcgtgcaagagctcacagtcgctgctggattccgacggaaagacttatctgaactggctgctccaaagaccagggcaatcaccgaaacgccttatctccctggtgtcgaaactcgactcgggtgtgccggatcggtttaccggtagcgggtccggcacggacttcactctccgcatttcgagggtggaagcggaggatctcgggatctactactgttggcagggaacccacttccctgggacttttggaggcggaactaagctggaaatcaagggtagccatcaccatcaccaccaccatcat

SEQ ID NO: 1409 - protein, 274 aa, Artificial Sequence
  source: /note="Description of Artificial Sequence: Synthetic polypeptide"
MALPVTALLLPLALLLHAARPEIQLQQSGAELVKPGASVKLSCTGSGFNIEDYYIHWVKQRTEQGLEWIGRIDPENDETKYGPIFQGRATITADTSSNTVYLQLSSLTSEDTAVYYCAFRGGVYWGPGTTLTVSSGGGGSGGGGSGGGGSHMDVVMTQSPLTLSVAIGQSASISCKSSQSLLDSDGKTYLNWLLQRPGQSPKRLISLVSKLDSGVPDRFTGSGSGTDFTLRISRVEAEDLGIYYCWQGTHFPGTFGGGTKLEIKGSHHHHHHHH

SEQ ID NO: 1410 - DNA, 1461 bp, Artificial Sequence
  source: /note="Description of Artificial Sequence: Synthetic polynucleotide"
atggccctccctgtcaccgccctgctgcttccgctggctcttctgctccacgccgctcggcccgagatccagctccaacagagcggagccgaactggtcaaaccgggagcgtcggtgaagttgtcatgcactggatcgggcttcaacatcgaggattactacatccactgggtcaagcaacgcaccgagcaggggctggaatggatcggacggatcgaccccgaaaacgatgaaaccaagtacgggcctatcttccaaggacgggccaccattacggctgacacgtcaagcaataccgtctacctccagctttccagcctgacctccgaggacactgccgtgtactactgcgccttcagaggaggcgtgtactggggaccaggaaccactttgaccgtgtccagcggaggcggtggatcaggaggaggaggctcaggcggtggcggctcgcacatggacgtggtcatgactcagtccccgctgaccctgtcggtggcaattggacagagcgcatccatctcgtgcaagagctcacagtcgctgctggattccgacggaaagacttatctgaactggctgctccaaagaccagggcaatcaccgaaacgccttatctccctggtgtcgaaactcgactcgggtgtgccggatcggtttaccggtagcgggtccggcacggacttcactctccgcatttcgagggtggaagcggaggatctcgggatctactactgttggcagggaacccacttccctgggacttttggaggcggaactaagctggaaatcaagaccactaccccagcaccgaggccacccaccccggctcctaccatcgcctcccagcctctgtccctgcgtccggaggcatgtagacccgcagctggtggggccgtgcatacccggggtcttgacttcgcctgcgatatctacatttgggcccctctggctggtacttgcggggtcctgctgctttcactcgtgatcactctttactgtaagcgcggtcggaagaagctgctgtacatctttaagcaacccttcatgaggcctgtgcagactactcaagaggaggacggctgttcatgccggttcccagaggaggaggaaggcggctgcgaactgcgcgtgaaattcagccgcagcgcagatgctccagcctacaagcaggggcagaaccagctctacaacgaactcaatcttggtcggagagaggagtacgacgtgctggacaagcggagaggacgggacccagaaatgggcgggaagccgcgcagaaagaatccccaagagggcctgtacaacgagctccaaaaggataagatggcagaagcctatagcgagattggtatgaaaggggaacgcagaagaggcaaaggccacgacggactgtaccagggactcagcaccgccaccaaggacacctatgacgctcttcacatgcaggccctgccgcctcgg

SEQ ID NO: 1411 - protein, 487 aa, Artificial Sequence
  source: /note="Description of Artificial Sequence: Synthetic polypeptide"
MALPVTALLLPLALLLHAARPEIQLQQSGAELVKPGASVKLSCTGSGFNIEDYYIHWVKQRTEQGLEWIGRIDPENDETKYGPIFQGRATITADTSSNTVYLQLSSLTSEDTAVYYCAFRGGVYWGPGTTLTVSSGGGGSGGGGSGGGGSHMDVVMTQSPLTLSVAIGQSASISCKSSQSLLDSDGKTYLNWLLQRPGQSPKRLISLVSKLDSGVPDRFTGSGSGTDFTLRISRVEAEDLGIYYCWQGTHFPGTFGGGTKLEIKTTTPAPRPPTPAPTIASQPLSLRPEACRPAAGGAVHTRGLDFACDIYIWAPLAGTCGVLLLSLVITLYCKRGRKKLLYIFKQPFMRPVQTTQEEDGCSCRFPEEEEGGCELRVKFSRSADAPAYKQGQNQLYNELNLGRREEYDVLDKRRGRDPEMGGKPRRKNPQEGLYNELQKDKMAEAYSEIGMKGERRRGKGHDGLYQGLSTATKDTYDALHMQALPPR

SEQ ID NO: 1412 - protein, 240 aa, Artificial Sequence
  source: /note="Description of Artificial Sequence: Synthetic polypeptide"
DIQMTQSPSSLSASVGDRVTITCRASQGIRNNLAWYQQKPGKAPKRLIYAASNLQSGVPSRFTGSGSGTEFTLIVSSLQPEDFATYYCLQHHSYPLTSGGGTKVEIKRTGSTSGSGKPGSGEGSEVQVLESGGGLVQPGGSLRLSCAASGFTFSSYAMSWVRQAPGKGLEWVSAISGSGGSTNYADSVKGRFTISRDNSKNTLYLQMNSLRAEDTAVYYCAGSSGWSEYWGQGTLVTVSS

SEQ ID NO: 1413 - DNA, 720 bp, Artificial Sequence
  source: /note="Description of Artificial Sequence: Synthetic polynucleotide"
gatatccaaatgactcagagcccttcatccctgagcgccagcgtcggagacagggtgaccatcacgtgccgggcatcccaaggcattagaaataacttggcgtggtatcagcaaaaaccaggaaaggccccgaagcgcctgatctacgcggcctccaaccttcagtcaggagtgccctcgcgcttcaccgggagcggtagcggaactgagtttacccttatcgtgtcgtccctgcagccagaggacttcgcgacctactactgcctccagcatcactcgtacccgttgacttcgggaggcggaaccaaggtcgaaatcaaacgcactggctcgacgtcagggtccggtaaaccgggatcgggagaaggatcggaagtccaagtgctggagagcggaggcggactcgtgcaacctggcgggtcgctgcggctcagctgtgccgcgtcgggttttactttcagctcgtacgctatgtcatgggtgcggcaggctccgggaaaggggctggaatgggtgtccgctatttccggctcgggtggaagcaccaattacgccgactccgtgaagggacgcttcaccatctcacgggataactccaagaatactctgtacctccagatgaactcgctgagagccgaggacaccgcagtgtactactgcgcagggtcaagcggctggtccgaatactggggacagggcaccctcgtcactgtcagctcc

SEQ ID NO: 1414 - DNA, 807 bp, Artificial Sequence
  source: /note="Description of Artificial Sequence: Synthetic polynucleotide"
atggccctccctgtcaccgccctgctgcttccgctggctcttctgctccacgccgctcggcccgatatccaaatgactcagagcccttcatccctgagcgccagcgtcggagacagggtgaccatcacgtgccgggcatcccaaggcattagaaataacttggcgtggtatcagcaaaaaccaggaaaggccccgaagcgcctgatctacgcggcctccaaccttcagtcaggagtgccctcgcgcttcaccgggagcggtagcggaactgagtttacccttatcgtgtcgtccctgcagccagaggacttcgcgacctactactgcctccagcatcactcgtacccgttgacttcgggaggcggaaccaaggtcgaaatcaaacgcactggctcgacgtcagggtccggtaaaccgggatcgggagaaggatcggaagtccaagtgctggagagcggaggcggactcgtgcaacctggcgggtcgctgcggctcagctgtgccgcgtcgggttttactttcagctcgtacgctatgtcatgggtgcggcaggctccgggaaaggggctggaatgggtgtccgctatttccggctcgggtggaagcaccaattacgccgactccgtgaagggacgcttcaccatctcacgggataactccaagaatactctgtacctccagatgaactcgctgagagccgaggacaccgcagtgtactactgcgcagggtcaagcggctggtccgaatactggggacagggcaccctcgtcactgtcagctcccatcaccatcaccaccaccatcac

SEQ ID NO: 1415 - protein, 269 aa, Artificial Sequence
  source: /note="Description of Artificial Sequence: Synthetic polypeptide"
MALPVTALLLPLALLLHAARPDIQMTQSPSSLSASVGDRVTITCRASQGIRNNLAWYQQKPGKAPKRLIYAASNLQSGVPSRFTGSGSGTEFTLIVSSLQPEDFATYYCLQHHSYPLTSGGGTKVEIKRTGSTSGSGKPGSGEGSEVQVLESGGGLVQPGGSLRLSCAASGFTFSSYAMSWVRQAPGKGLEWVSAISGSGGSTNYADSVKGRFTISRDNSKNTLYLQMNSLRAEDTAVYYCAGSSGWSEYWGQGTLVTVSSHHHHHHHH

SEQ ID NO: 1416 - DNA, 1452 bp, Artificial Sequence
  source: /note="Description of Artificial Sequence: Synthetic polynucleotide"
atggccctccctgtcaccgccctgctgcttccgctggctcttctgctccacgccgctcggcccgatatccaaatgactcagagcccttcatccctgagcgccagcgtcggagacagggtgaccatcacgtgccgggcatcccaaggcattagaaataacttggcgtggtatcagcaaaaaccaggaaaggccccgaagcgcctgatctacgcggcctccaaccttcagtcaggagtgccctcgcgcttcaccgggagcggtagcggaactgagtttacccttatcgtgtcgtccctgcagccagaggacttcgcgacctactactgcctccagcatcactcgtacccgttgacttcgggaggcggaaccaaggtcgaaatcaaacgcactggctcgacgtcagggtccggtaaaccgggatcgggagaaggatcggaagtccaagtgctggagagcggaggcggactcgtgcaacctggcgggtcgctgcggctcagctgtgccgcgtcgggttttactttcagctcgtacgctatgtcatgggtgcggcaggctccgggaaaggggctggaatgggtgtccgctatttccggctcgggtggaagcaccaattacgccgactccgtgaagggacgcttcaccatctcacgggataactccaagaatactctgtacctccagatgaactcgctgagagccgaggacaccgcagtgtactactgcgcagggtcaagcggctggtccgaatactggggacagggcaccctcgtcactgtcagctccaccactaccccagcaccgaggccacccaccccggctcctaccatcgcctcccagcctctgtccctgcgtccggaggcatgtagacccgcagctggtggggccgtgcatacccggggtcttgacttcgcctgcgatatctacatttgggcccctctggctggtacttgcggggtcctgctgctttcactcgtgatcactctttactgtaagcgcggtcggaagaagctgctgtacatctttaagcaacccttcatgaggcctgtgcagactactcaagaggaggacggctgttcatgccggttcccagaggaggaggaaggcggctgcgaactgcgcgtgaaattcagccgcagcgcagatgctccagcctacaagcaggggcagaaccagctctacaacgaactcaatcttggtcggagagaggagtacgacgtgctggacaagcggagaggacgggacccagaaatgggcgggaagccgcgcagaaagaatccccaagagggcctgtacaacgagctccaaaaggataagatggcagaagcctatagcgagattggtatgaaaggggaacgcagaagaggcaaaggccacgacggactgtaccagggactcagcaccgccaccaaggacacctatgacgctcttcacatgcaggccctgccgcctcgg

SEQ ID NO: 1417 - protein, 484 aa, Artificial Sequence
  source: /note="Description of Artificial Sequence: Synthetic polypeptide"
MALPVTALLLPLALLLHAARPDIQMTQSPSSLSASVGDRVTITCRASQGIRNNLAWYQQKPGKAPKRLIYAASNLQSGVPSRFTGSGSGTEFTLIVSSLQPEDFATYYCLQHHSYPLTSGGGTKVEIKRTGSTSGSGKPGSGEGSEVQVLESGGGLVQPGGSLRLSCAASGFTFSSYAMSWVRQAPGKGLEWVSAISGSGGSTNYADSVKGRFTISRDNSKNTLYLQMNSLRAEDTAVYYCAGSSGWSEYWGQGTLVTVSSTTTPAPRPPTPAPTIASQPLSLRPEACRPAAGGAVHTRGLDFACDIYIWAPLAGTCGVLLLSLVITLYCKRGRKKLLYIFKQPFMRPVQTTQEEDGCSCRFPEEEEGGCELRVKFSRSADAPAYKQGQNQLYNELNLGRREEYDVLDKRRGRDPEMGGKPRRKNPQEGLYNELQKDKMAEAYSEIGMKGERRRGKGHDGLYQGLSTATKDTYDALHMQALPPR

SEQ ID NO: 1418 - protein, 244 aa, Artificial Sequence
  source: /note="Description of Artificial Sequence: Synthetic polypeptide"
QVQLQQSGAEVKKPGASVKVSCKASGYTFTGYYMHWVRQAPGQGLEWMGRINPNSGGTNYAQKFQGRVTMTRDTSISTAYMELSRLRSEDTAVYYCARGRYYGMDVWGQGTMVTVSSGGGGSGGGGSGGGGSGGGGSEIVLTQSPATLSLSPGERATISCRASQSVSSNFAWYQQRPGQAPRLLIYDASNRATGIPPRFSGSGSGTDFTLTISSLEPEDFAAYYCHQRSNWLYTFGQGTKVDIK

SEQ ID NO: 1419 - protein, 488 aa, Artificial Sequence
  source: /note="Description of Artificial Sequence: Synthetic polypeptide"
MALPVTALLLPLALLLHAARPQVQLQQSGAEVKKPGASVKVSCKASGYTFTGYYMHWVRQAPGQGLEWMGRINPNSGGTNYAQKFQGRVTMTRDTSISTAYMELSRLRSEDTAVYYCARGRYYGMDVWGQGTMVTVSSGGGGSGGGGSGGGGSGGGGSEIVLTQSPATLSLSPGERATISCRASQSVSSNFAWYQQRPGQAPRLLIYDASNRATGIPPRFSGSGSGTDFTLTISSLEPEDFAAYYCHQRSNWLYTFGQGTKVDIKTTTPAPRPPTPAPTIASQPLSLRPEACRPAAGGAVHTRGLDFACDIYIWAPLAGTCGVLLLSLVITLYCKRGRKKLLYIFKQPFMRPVQTTQEEDGCSCRFPEEEEGGCELRVKFSRSADAPAYKQGQNQLYNELNLGRREEYDVLDKRRGRDPEMGGKPRRKNPQEGLYNELQKDKMAEAYSEIGMKGERRRGKGHDGLYQGLSTATKDTYDALHMQALPPR

SEQ ID NO: 1420 - protein, 253 aa, Artificial Sequence
  source: /note="Description of Artificial Sequence: Synthetic polypeptide"
QVQLVQSGAEVKKPGASVKVSCKASGYTFTGYYMHWVRQAPGQGLEWMGWINPNSGGTNYAQKFQGRVTMTRDTSISTAYMELSRLRSDDTAVYYCARDLRRTVVTPRAYYGMDVWGQGTTVTVSSGGGGSGGGGSGGGGSGGGGSDIQLTQSPSTLSASVGDRVTITCQASQDISNSLNWYQQKAGKAPKLLIYDASTLETGVPSRFSGSGSGTDFSFTISSLQPEDIATYYCQQHDNLPLTFGQGTKVEIK

SEQ ID NO: 1421 - protein, 497 aa, Artificial Sequence
  source: /note="Description of Artificial Sequence: Synthetic polypeptide"
MALPVTALLLPLALLLHAARPQVQLVQSGAEVKKPGASVKVSCKASGYTFTGYYMHWVRQAPGQGLEWMGWINPNSGGTNYAQKFQGRVTMTRDTSISTAYMELSRLRSDDTAVYYCARDLRRTVVTPRAYYGMDVWGQGTTVTVSSGGGGSGGGGSGGGGSGGGGSDIQLTQSPSTLSASVGDRVTITCQASQDISNSLNWYQQKAGKAPKLLIYDASTLETGVPSRFSGSGSGTDFSFTISSLQPEDIATYYCQQHDNLPLTFGQGTKVEIKTTTPAPRPPTPAPTIASQPLSLRPEACRPAAGGAVHTRGLDFACDIYIWAPLAGTCGVLLLSLVITLYCKRGRKKLLYIFKQPFMRPVQTTQEEDGCSCRFPEEEEGGCELRVKFSRSADAPAYKQGQNQLYNELNLGRREEYDVLDKRRGRDPEMGGKPRRKNPQEGLYNELQKDKMAEAYSEIGMKGERRRGKGHDGLYQGLSTATKDTYDALHMQALPPR

SEQ ID NO: 1422 - protein, 246 aa, Artificial Sequence
  source: /note="Description of Artificial Sequence: Synthetic polypeptide"
QVQLVQSGAEVKKPGAPVKVSCKASGYTFTGYYMHWVRQAPGQGLEWMGWINPNSGGTNYAQKFQGRVTMTRDTSISTAYMELSRLRSDDTAVYYCARGEWDGSYYYDYWGQGTLVTVSSGGGGSGGGGSGGGGSGGGGSDIVLTQTPSSLSASVGDRVTITCRASQSINTYLNWYQHKPGKAPKLLIYAASSLQSGVPSRFSGSGSGTDFTLTISSLQPEDFATYYCQQSFSPLTFGGGTKLEIK

SEQ ID NO: 1423 - protein, 490 aa, Artificial Sequence
  source: /note="Description of Artificial Sequence: Synthetic polypeptide"
MALPVTALLLPLALLLHAARPQVQLVQSGAEVKKPGAPVKVSCKASGYTFTGYYMHWVRQAPGQGLEWMGWINPNSGGTNYAQKFQGRVTMTRDTSISTAYMELSRLRSDDTAVYYCARGEWDGSYYYDYWGQGTLVTVSSGGGGSGGGGSGGGGSGGGGSDIVLTQTPSSLSASVGDRVTITCRASQSINTYLNWYQHKPGKAPKLLIYAASSLQSGVPSRFSGSGSGTDFTLTISSLQPEDFATYYCQQSFSPLTFGGGTKLEIKTTTPAPRPPTPAPTIASQPLSLRPEACRPAAGGAVHTRGLDFACDIYIWAPLAGTCGVLLLSLVITLYCKRGRKKLLYIFKQPFMRPVQTTQEEDGCSCRFPEEEEGGCELRVKFSRSADAPAYKQGQNQLYNELNLGRREEYDVLDKRRGRDPEMGGKPRRKNPQEGLYNELQKDKMAEAYSEIGMKGERRRGKGHDGLYQGLSTATKDTYDALHMQALPPR

SEQ ID NO: 1424 - protein, 242 aa, Artificial Sequence
  source: /note="Description of Artificial Sequence: Synthetic polypeptide"
QVQLVESGGGLVQPGGSLRLSCAASGFTFSSYWMHWVRQVPGKGLVWVSRINTDGSTTTYADSVEGRFTISRDNAKNTLYLQMNSLRDDDTAVYYCVGGHWAVWGQGTTVTVSSGGGGSGGGGSGGGGSGGGGSDIQMTQSPSTLSASVGDRVTITCRASQSISDRLAWYQQKPGKAPKLLIYKASSLESGVPSRFSGSGSGTEFTLTISSLQPDDFAVYYCQQYGHLPMYTFGQGTKVEIK

SEQ ID NO: 1425 - protein, 486 aa, Artificial Sequence
  source: /note="Description of Artificial Sequence: Synthetic polypeptide"
MALPVTALLLPLALLLHAARPQVQLVESGGGLVQPGGSLRLSCAASGFTFSSYWMHWVRQVPGKGLVWVSRINTDGSTTTYADSVEGRFTISRDNAKNTLYLQMNSLRDDDTAVYYCVGGHWAVWGQGTTVTVSSGGGGSGGGGSGGGGSGGGGSDIQMTQSPSTLSASVGDRVTITCRASQSISDRLAWYQQKPGKAPKLLIYKASSLESGVPSRFSGSGSGTEFTLTISSLQPDDFAVYYCQQYGHLPMYTFGQGTKVEIKTTTPAPRPPTPAPTIASQPLSLRPEACRPAAGGAVHTRGLDFACDIYIWAPLAGTCGVLLLSLVITLYCKRGRKKLLYIFKQPFMRPVQTTQEEDGCSCRFPEEEEGGCELRVKFSRSADAPAYKQGQNQLYNELNLGRREEYDVLDKRRGRDPEMGGKPRRKNPQEGLYNELQKDKMAEAYSEIGMKGERRRGKGHDGLYQGLSTATKDTYDALHMQALPPR

SEQ ID NO: 1426 - protein, 241 aa, Artificial Sequence
  source: /note="Description of Artificial Sequence: Synthetic polypeptide"
QVQLVQSGAEVEKPGASVKVSCKASGYTFTDYYMHWVRQAPGQGLEWMGWINPNSGGTNYAQKFQGRVTMTRDTSISTAYMELSRLRSDDTAVYYCASGWDFDYWGQGTLVTVSSGGGGSGGGGSGGGGSGGGGSDIVMTQSPSSLSASVGDRVTITCRASQSIRYYLSWYQQKPGKAPKLLIYTASILQNGVPSRFSGSGSGTDFTLTISSLQPEDFATYYCLQTYTTPDFGPGTKVEIK

SEQ ID NO: 1427 - protein, 485 aa, Artificial Sequence
  source: /note="Description of Artificial Sequence: Synthetic polypeptide"
MALPVTALLLPLALLLHAARPQVQLVQSGAEVEKPGASVKVSCKASGYTFTDYYMHWVRQAPGQGLEWMGWINPNSGGTNYAQKFQGRVTMTRDTSISTAYMELSRLRSDDTAVYYCASGWDFDYWGQGTLVTVSSGGGGSGGGGSGGGGSGGGGSDIVMTQSPSSLSASVGDRVTITCRASQSIRYYLSWYQQKPGKAPKLLIYTASILQNGVPSRFSGSGSGTDFTLTISSLQPEDFATYYCLQTYTTPDFGPGTKVEIKTTTPAPRPPTPAPTIASQPLSLRPEACRPAAGGAVHTRGLDFACDIYIWAPLAGTCGVLLLSLVITLYCKRGRKKLLYIFKQPFMRPVQTTQEEDGCSCRFPEEEEGGCELRVKFSRSADAPAYKQGQNQLYNELNLGRREEYDVLDKRRGRDPEMGGKPRRKNPQEGLYNELQKDKMAEAYSEIGMKGERRRGKGHDGLYQGLSTATKDTYDALHMQALPPR

SEQ ID NO: 1428 - protein, 253 aa, Artificial Sequence
  source: /note="Description of Artificial Sequence: Synthetic polypeptide"
QVQLVQSGAEVKKPGASVKVSCKASGYTFTSYYMHWVRQAPGQGLEWMGIINPSGGSTSYAQKFQGRVTMTRDTSTSTVYMELSSLRSEDTAVYYCARYRLIAVAGDYYYYGMDVWGQGTMVTVSSGGGGSGGGGSGGGGSGGGGSDIQMTQSPSSVSASVGDRVTITCRASQGVGRWLAWYQQKPGTAPKLLIYAASTLQSGVPSRFSGSGSGTDFTLTINNLQPEDFATYYCQQANSFPLTFGGGTRLEIK

SEQ ID NO: 1429 - protein, 497 aa, Artificial Sequence
  source: /note="Description of Artificial Sequence: Synthetic polypeptide"
MALPVTALLLPLALLLHAARPQVQLVQSGAEVKKPGASVKVSCKASGYTFTSYYMHWVRQAPGQGLEWMGIINPSGGSTSYAQKFQGRVTMTRDTSTSTVYMELSSLRSEDTAVYYCARYRLIAVAGDYYYYGMDVWGQGTMVTVSSGGGGSGGGGSGGGGSGGGGSDIQMTQSPSSVSASVGDRVTITCRASQGVGRWLAWYQQKPGTAPKLLIYAASTLQSGVPSRFSGSGSGTDFTLTINNLQPEDFATYYCQQANSFPLTFGGGTRLEIKTTTPAPRPPTPAPTIASQPLSLRPEACRPAAGGAVHTRGLDFACDIYIWAPLAGTCGVLLLSLVITLYCKRGRKKLLYIFKQPFMRPVQTTQEEDGCSCRFPEEEEGGCELRVKFSRSADAPAYKQGQNQLYNELNLGRREEYDVLDKRRGRDPEMGGKPRRKNPQEGLYNELQKDKMAEAYSEIGMKGERRRGKGHDGLYQGLSTATKDTYDALHMQALPPR

SEQ ID NO: 1430 - protein, 250 aa, Artificial Sequence
  source: /note="Description of Artificial Sequence: Synthetic polypeptide"
QVQLVQSGGGVVQPGRSLRLSCAASGFTFSSYAMHWVRQAPGKGLEWVAVISYDGSNKYYADSVKGRFTISRDNSKNTLYLQMNSLRAEDTAVYYCARWKVSSSSPAFDYWGQGTLVTVSSGGGGSGGGGSGGGGSGGGGSEIVLTQSPATLSLSPGERAILSCRASQSVYTKYLGWYQQKPGQAPRLLIYDASTRATGIPDRFSGSGSGTDFTLTINRLEPEDFAVYYCQHYGGSPLITFGQGTRLEIK

SEQ ID NO: 1431 - protein, 494 aa, Artificial Sequence
  source: /note="Description of Artificial Sequence: Synthetic polypeptide"
MALPVTALLLPLALLLHAARPQVQLVQSGGGVVQPGRSLRLSCAASGFTFSSYAMHWVRQAPGKGLEWVAVISYDGSNKYYADSVKGRFTISRDNSKNTLYLQMNSLRAEDTAVYYCARWKVSSSSPAFDYWGQGTLVTVSSGGGGSGGGGSGGGGSGGGGSEIVLTQSPATLSLSPGERAILSCRASQSVYTKYLGWYQQKPGQAPRLLIYDASTRATGIPDRFSGSGSGTDFTLTINRLEPEDFAVYYCQHYGGSPLITFGQGTRLEIKTTTPAPRPPTPAPTIASQPLSLRPEACRPAAGGAVHTRGLDFACDIYIWAPLAGTCGVLLLSLVITLYCKRGRKKLLYIFKQPFMRPVQTTQEEDGCSCRFPEEEEGGCELRVKFSRSADAPAYKQGQNQLYNELNLGRREEYDVLDKRRGRDPEMGGKPRRKNPQEGLYNELQKDKMAEAYSEIGMKGERRRGKGHDGLYQGLSTATKDTYDALHMQALPPR

SEQ ID NO: 1432 - protein, 246 aa, Artificial Sequence
  source: /note="Description of Artificial Sequence: Synthetic polypeptide"
QVQLQQSGAEVKKPGASVKVSCKTSGYPFTGYSLHWVRQAPGQGLEWMGWINPNSGGTNYAQKFQGRVTMTRDTSISTAYMELSRLRSDDTAVYYCARDHYGGNSLFYWGQGTLVTVSSGGGGSGGGGSGGGGSGGGGSDIQLTQSPSSISASVGDTVSITCRASQDSGTWLAWYQQKPGKAPNLLMYDASTLEDGVPSRFSGSASGTEFTLTVNRLQPEDSATYYCQQYNSYPLTFGGGTKVDIK

SEQ ID NO: 1433 - protein, 490 aa, Artificial Sequence
  source: /note="Description of Artificial Sequence: Synthetic polypeptide"
MALPVTALLLPLALLLHAARPQVQLQQSGAEVKKPGASVKVSCKTSGYPFTGYSLHWVRQAPGQGLEWMGWINPNSGGTNYAQKFQGRVTMTRDTSISTAYMELSRLRSDDTAVYYCARDHYGGNSLFYWGQGTLVTVSSGGGGSGGGGSGGGGSGGGGSDIQLTQSPSSISASVGDTVSITCRASQDSGTWLAWYQQKPGKAPNLLMYDASTLEDGVPSRFSGSASGTEFTLTVNRLQPEDSATYYCQQYNSYPLTFGGGTKVDIKTTTPAPRPPTPAPTIASQPLSLRPEACRPAAGGAVHTRGLDFACDIYIWAPLAGTCGVLLLSLVITLYCKRGRKKLLYIFKQPFMRPVQTTQEEDGCSCRFPEEEEGGCELRVKFSRSADAPAYKQGQNQLYNELNLGRREEYDVLDKRRGRDPEMGGKPRRKNPQEGLYNELQKDKMAEAYSEIGMKGERRRGKGHDGLYQGLSTATKDTYDALHMQALPPR

SEQ ID NO: 1434 - protein, 248 aa, Artificial Sequence
  source: /note="Description of Artificial Sequence: Synthetic polypeptide"
QVQLVQSGAEVKKPGASVEVSCKASGYTFTSYYMHWVRQAPGQGLEWMGIINPSGGSTGYAQKFQGRVTMTRDTSTSTVHMELSSLRSEDTAVYYCARGGYSSSSDAFDIWGQGTMVTVSSGGGGSGGGGSGGGGSGGGGSDIQMTQSPPSLSASVGDRVTITCRASQDISSALAWYQQKPGTPPKLLIYDASSLESGVPSRFSGSGSGTDFTLTISSLQPEDFATYYCQQFSSYPLTFGGGTRLEIK

SEQ ID NO: 1435 - protein, 492 aa, Artificial Sequence
  source: /note="Description of Artificial Sequence: Synthetic polypeptide"
MALPVTALLLPLALLLHAARPQVQLVQSGAEVKKPGASVEVSCKASGYTFTSYYMHWVRQAPGQGLEWMGIINPSGGSTGYAQKFQGRVTMTRDTSTSTVHMELSSLRSEDTAVYYCARGGYSSSSDAFDIWGQGTMVTVSSGGGGSGGGGSGGGGSGGGGSDIQMTQSPPSLSASVGDRVTITCRASQDISSALAWYQQKPGTPPKLLIYDASSLESGVPSRFSGSGSGTDFTLTISSLQPEDFATYYCQQFSSYPLTFGGGTRLEIKTTTPAPRPPTPAPTIASQPLSLRPEACRPAAGGAVHTRGLDFACDIYIWAPLAGTCGVLLLSLVITLYCKRGRKKLLYIFKQPFMRPVQTTQEEDGCSCRFPEEEEGGCELRVKFSRSADAPAYKQGQNQLYNELNLGRREEYDVLDKRRGRDPEMGGKPRRKNPQEGLYNELQKDKMAEAYSEIGMKGERRRGKGHDGLYQGLSTATKDTYDALHMQALPPR

SEQ ID NO: 1436 - protein, 255 aa, Artificial Sequence
  source: /note="Description of Artificial Sequence: Synthetic polypeptide"
QVQLVQSGAEVKKPGASVKVSCKASGYTFTSYGISWVRQAPGQGLEWMGWISAYNGNTNYAQKLQGRVTMTTDTSTSTAYMELRSLRSDDTAVYYCARVAGGIYYYYGMDVWGQGTTITVSSGGGGSGGGGSGGGGSGGGGSDIVMTQTPDSLAVSLGERATISCKSSHSVLYNRNNKNYLAWYQQKPGQPPKLLFYWASTRKSGVPDRFSGSGSGTDFTLTISSLQPEDFATYFCQQTQTFPLTFGQGTRLEIN

SEQ ID NO: 1437 - protein, 499 aa, Artificial Sequence
  source: /note="Description of Artificial Sequence: Synthetic polypeptide"
MALPVTALLLPLALLLHAARPQVQLVQSGAEVKKPGASVKVSCKASGYTFTSYGISWVRQAPGQGLEWMGWISAYNGNTNYAQKLQGRVTMTTDTSTSTAYMELRSLRSDDTAVYYCARVAGGIYYYYGMDVWGQGTTITVSSGGGGSGGGGSGGGGSGGGGSDIVMTQTPDSLAVSLGERATISCKSSHSVLYNRNNKNYLAWYQQKPGQPPKLLFYWASTRKSGVPDRFSGSGSGTDFTLTISSLQPEDFATYFCQQTQTFPLTFGQGTRLEINTTTPAPRPPTPAPTIASQPLSLRPEACRPAAGGAVHTRGLDFACDIYIWAPLAGTCGVLLLSLVITLYCKRGRKKLLYIFKQPFMRPVQTTQEEDGCSCRFPEEEEGGCELRVKFSRSADAPAYKQGQNQLYNELNLGRREEYDVLDKRRGRDPEMGGKPRRKNPQEGLYNELQKDKMAEAYSEIGMKGERRRGKGHDGLYQGLSTATKDTYDALHMQALPPR

SEQ ID NO: 1438 - protein, 241 aa, Artificial Sequence
  source: /note="Description of Artificial Sequence: Synthetic polypeptide"
QVQLQQSGAEVKKPGASVKVSCKASGYTFTGYYMHWVRQAPGQGLEWMGWINPNSGGTNYAQNFQGRVTMTRDTSISTAYMELRRLRSDDTAVYYCASGWDFDYWGQGTLVTVSSGGGGSGGGGSGGGGSGGGGSDIRMTQSPSSLSASVGDRVTITCRASQSIRYYLSWYQQKPGKAPKLLIYTASILQNGVPSRFSGSGSGTDFTLTISSLQPEDFATYYCLQTYTTPDFGPGTKVEIK

SEQ ID NO: 1439 - protein, 485 aa, Artificial Sequence
  source: /note="Description of Artificial Sequence: Synthetic polypeptide"
MALPVTALLLPLALLLHAARPQVQLQQSGAEVKKPGASVKVSCKASGYTFTGYYMHWVRQAPGQGLEWMGWINPNSGGTNYAQNFQGRVTMTRDTSISTAYMELRRLRSDDTAVYYCASGWDFDYWGQGTLVTVSSGGGGSGGGGSGGGGSGGGGSDIRMTQSPSSLSASVGDRVTITCRASQSIRYYLSWYQQKPGKAPKLLIYTASILQNGVPSRFSGSGSGTDFTLTISSLQPEDFATYYCLQTYTTPDFGPGTKVEIKTTTPAPRPPTPAPTIASQPLSLRPEACRPAAGGAVHTRGLDFACDIYIWAPLAGTCGVLLLSLVITLYCKRGRKKLLYIFKQPFMRPVQTTQEEDGCSCRFPEEEEGGCELRVKFSRSADAPAYKQGQNQLYNELNLGRREEYDVLDKRRGRDPEMGGKPRRKNPQEGLYNELQKDKMAEAYSEIGMKGERRRGKGHDGLYQGLSTATKDTYDALHMQALPPR

SEQ ID NO: 1440 - protein, 246 aa, Artificial Sequence
  source: /note="Description of Artificial Sequence: Synthetic polypeptide"
QVQLVQSGAEVKKPGASVKVSCKASGYTFTGYYMHWVRQAPGQGLEWMGRINPNSGGTNYAQKFQGRVTMTTDTSTSTAYMELRSLRSDDTAVYYCARTTTSYAFDIWGQGTMVTVSSGGGGSGGGGSGGGGSGGGGSDIQLTQSPSTLSASVGDRVTITCRASQSISTWLAWYQQKPGKAPNLLIYKASTLESGVPSRFSGSGSGTEFTLTISSLQPDDFATYYCQQYNTYSPYTFGQGTKLEIK

SEQ ID NO: 1441 - protein, 490 aa, Artificial Sequence
  source: /note="Description of Artificial Sequence: Synthetic polypeptide"
MALPVTALLLPLALLLHAARPQVQLVQSGAEVKKPGASVKVSCKASGYTFTGYYMHWVRQAPGQGLEWMGRINPNSGGTNYAQKFQGRVTMTTDTSTSTAYMELRSLRSDDTAVYYCARTTTSYAFDIWGQGTMVTVSSGGGGSGGGGSGGGGSGGGGSDIQLTQSPSTLSASVGDRVTITCRASQSISTWLAWYQQKPGKAPNLLIYKASTLESGVPSRFSGSGSGTEFTLTISSLQPDDFATYYCQQYNTYSPYTFGQGTKLEIKTTTPAPRPPTPAPTIASQPLSLRPEACRPAAGGAVHTRGLDFACDIYIWAPLAGTCGVLLLSLVITLYCKRGRKKLLYIFKQPFMRPVQTTQEEDGCSCRFPEEEEGGCELRVKFSRSADAPAYKQGQNQLYNELNLGRREEYDVLDKRRGRDPEMGGKPRRKNPQEGLYNELQKDKMAEAYSEIGMKGERRRGKGHDGLYQGLSTATKDTYDALHMQALPPR

SEQ ID NO: 1442 - protein, 249 aa, Artificial Sequence
  source: /note="Description of Artificial Sequence: Synthetic polypeptide"
QVQLVQSGGGLVKPGGSLRLSCEASGFIFSDYYMGWIRQAPGKGLEWVSYIGRSGSSMYYADSVKGRFTFSRDNAKNSLYLQMNSLRAEDTAVYYCAASPVVAATEDFQHWGQGTLVTVSSGGGGSGGGGSGGGGSGGGGSDIVMTQTPATLSLSPGERATLSCRASQSVTSNYLAWYQQKPGQAPRLLLFGASTRATGIPDRFSGSGSGTDFTLTINRLEPEDFAMYYCQQYGSAPVTFGQGTKLEIK

SEQ ID NO: 1443 - protein, 493 aa, Artificial Sequence
  source: /note="Description of Artificial Sequence: Synthetic polypeptide"
MALPVTALLLPLALLLHAARPQVQLVQSGGGLVKPGGSLRLSCEASGFIFSDYYMGWIRQAPGKGLEWVSYIGRSGSSMYYADSVKGRFTFSRDNAKNSLYLQMNSLRAEDTAVYYCAASPVVAATEDFQHWGQGTLVTVSSGGGGSGGGGSGGGGSGGGGSDIVMTQTPATLSLSPGERATLSCRASQSVTSNYLAWYQQKPGQAPRLLLFGASTRATGIPDRFSGSGSGTDFTLTINRLEPEDFAMYYCQQYGSAPVTFGQGTKLEIKTTTPAPRPPTPAPTIASQPLSLRPEACRPAAGGAVHTRGLDFACDIYIWAPLAGTCGVLLLSLVITLYCKRGRKKLLYIFKQPFMRPVQTTQEEDGCSCRFPEEEEGGCELRVKFSRSADAPAYKQGQNQLYNELNLGRREEYDVLDKRRGRDPEMGGKPRRKNPQEGLYNELQKDKMAEAYSEIGMKGERRRGKGHDGLYQGLSTATKDTYDALHMQALPPR

SEQ ID NO: 1444 - protein, 249 aa, Artificial Sequence
  source: /note="Description of Artificial Sequence: Synthetic polypeptide"
QVQLVQSGAEVRAPGASVKISCKASGFTFRGYYIHWVRQAPGQGLEWMGIINPSGGSRAYAQKFQGRVTMTRDTSTSTVYMELSSLRSDDTAMYYCARTASCGGDCYYLDYWGQGTLVTVSSGGGGSGGGGSGGGGSGGGGSDIQMTQSPPTLSASVGDRVTITCRASENVNIWLAWYQQKPGKAPKLLIYKSSSLASGVPSRFSGSGSGAEFTLTISSLQPDDFATYYCQQYQSYPLTFGGGTKVDIK

SEQ ID NO: 1445 - protein, 493 aa, Artificial Sequence
  source: /note="Description of Artificial Sequence: Synthetic polypeptide"
MALPVTALLLPLALLLHAARPQVQLVQSGAEVRAPGASVKISCKASGFTFRGYYIHWVRQAPGQGLEWMGIINPSGGSRAYAQKFQGRVTMTRDTSTSTVYMELSSLRSDDTAMYYCARTASCGGDCYYLDYWGQGTLVTVSSGGGGSGGGGSGGGGSGGGGSDIQMTQSPPTLSASVGDRVTITCRASENVNIWLAWYQQKPGKAPKLLIYKSSSLASGVPSRFSGSGSGAEFTLTISSLQPDDFATYYCQQYQSYPLTFGGGTKVDIKTTTPAPRPPTPAPTIASQPLSLRPEACRPAAGGAVHTRGLDFACDIYIWAPLAGTCGVLLLSLVITLYCKRGRKKLLYIFKQPFMRPVQTTQEEDGCSCRFPEEEEGGCELRVKFSRSADAPAYKQGQNQLYNELNLGRREEYDVLDKRRGRDPEMGGKPRRKNPQEGLYNELQKDKMAEAYSEIGMKGERRRGKGHDGLYQGLSTATKDTYDALHMQALPPR

SEQ ID NO: 1446 - protein, 244 aa, Artificial Sequence
  source: /note="Description of Artificial Sequence: Synthetic polypeptide"
QVQLVQSGGGLVQPGRSLRLSCAASGFTFDDYAMHWVRQAPGKGLEWVSGISWNSGSIGYADSVKGRFTISRDNAKNSLYLQMNSLRAEDTAVYYCAKDGSSSWSWGYFDYWGQGTLVTVSSGGGGSGGGGSGGGGSSSELTQDPAVSVALGQTVRTTCQGDALRSYYASWYQQKPGQAPMLVIYGKNNRPSGIPDRFSGSDSGDTASLTITGAQAEDEADYYCNSRDSSGYPVFGTGTKVTVL

SEQ ID NO: 1447 - protein, 488 aa, Artificial Sequence
  source: /note="Description of Artificial Sequence: Synthetic polypeptide"
MALPVTALLLPLALLLHAARPQVQLVQSGGGLVQPGRSLRLSCAASGFTFDDYAMHWVRQAPGKGLEWVSGISWNSGSIGYADSVKGRFTISRDNAKNSLYLQMNSLRAEDTAVYYCAKDGSSSWSWGYFDYWGQGTLVTVSSGGGGSGGGGSGGGGSSSELTQDPAVSVALGQTVRTTCQGDALRSYYASWYQQKPGQAPMLVIYGKNNRPSGIPDRFSGSDSGDTASLTITGAQAEDEADYYCNSRDSSGYPVFGTGTKVTVLTTTPAPRPPTPAPTIASQPLSLRPEACRPAAGGAVHTRGLDFACDIYIWAPLAGTCGVLLLSLVITLYCKRGRKKLLYIFKQPFMRPVQTTQEEDGCSCRFPEEEEGGCELRVKFSRSADAPAYKQGQNQLYNELNLGRREEYDVLDKRRGRDPEMGGKPRRKNPQEGLYNELQKDKMAEAYSEIGMKGERRRGKGHDGLYQGLSTATKDTYDALHMQALPPR

SEQ ID NO: 1448 - protein, 246 aa, Artificial Sequence
  source: /note="Description of Artificial Sequence: Synthetic polypeptide"
EVQLVESGGGLVQPGRSLRLSCAASGFTFDDYAMHWVRQAPGKGLEWVSGISWNSGSTGYADSVKGRFTISRDNAKNSLYLQMNSLRAEDTALYYCAKDSSSWYGGGSAFDIWGQGTMVTVSSGGGGSGGGGSGGGGSSSELTQEPAVSVALGQTVRITCQGDSLRSYYASWYQQKPGQAPVLVIFGRSRRPSGIPDRFSGSSSGNTASLIITGAQAEDEADYYCNSRDNTANHYVFGTGTKLTVL

SEQ ID NO: 1449 - protein, 490 aa, Artificial Sequence
  source: /note="Description of Artificial Sequence: Synthetic polypeptide"
MALPVTALLLPLALLLHAARPEVQLVESGGGLVQPGRSLRLSCAASGFTFDDYAMHWVRQAPGKGLEWVSGISWNSGSTGYADSVKGRFTISRDNAKNSLYLQMNSLRAEDTALYYCAKDSSSWYGGGSAFDIWGQGTMVTVSSGGGGSGGGGSGGGGSSSELTQEPAVSVALGQTVRITCQGDSLRSYYASWYQQKPGQAPVLVIFGRSRRPSGIPDRFSGSSSGNTASLIITGAQAEDEADYYCNSRDNTANHYVFGTGTKLTVLTTTPAPRPPTPAPTIASQPLSLRPEACRPAAGGAVHTRGLDFACDIYIWAPLAGTCGVLLLSLVITLYCKRGRKKLLYIFKQPFMRPVQTTQEEDGCSCRFPEEEEGGCELRVKFSRSADAPAYKQGQNQLYNELNLGRREEYDVLDKRRGRDPEMGGKPRRKNPQEGLYNELQKDKMAEAYSEIGMKGERRRGKGHDGLYQGLSTATKDTYDALHMQALPPR

SEQ ID NO: 1450 - protein, 246 aa, Artificial Sequence
  source: /note="Description of Artificial Sequence: Synthetic polypeptide"
EVQLVESGGGLVQPGRSLRLSCAASGFTFDDYAMHWVRQAPGKGLEWVSGISWNSGSTGYADSVKGRFTISRDNAKNSLYLQMNSLRAEDTALYYCAKDSSSWYGGGSAFDIWGQGTMVTVSSGGGGSGGGGSGGGGSSSELTQDPAVSVALGQTVRITCQGDSLRSYYASWYQQKPGQAPVLVIYGKNNRPSGIPDRFSGSSSGNTASLTITGAQAEDEADYYCNSRGSSGNHYVFGTGTKVTVL

SEQ ID NO: 1451 - protein, 490 aa, Artificial Sequence
  source: /note="Description of Artificial Sequence: Synthetic polypeptide"
MALPVTALLLPLALLLHAARPEVQLVESGGGLVQPGRSLRLSCAASGFTFDDYAMHWVRQAPGKGLEWVSGISWNSGSTGYADSVKGRFTISRDNAKNSLYLQMNSLRAEDTALYYCAKDSSSWYGGGSAFDIWGQGTMVTVSSGGGGSGGGGSGGGGSSSELTQDPAVSVALGQTVRITCQGDSLRSYYASWYQQKPGQAPVLVIYGKNNRPSGIPDRFSGSSSGNTASLTITGAQAEDEADYYCNSRGSSGNHYVFGTGTKVTVLTTTPAPRPPTPAPTIASQPLSLRPEACRPAAGGAVHTRGLDFACDIYIWAPLAGTCGVLLLSLVITLYCKRGRKKLLYIFKQPFMRPVQTTQEEDGCSCRFPEEEEGGCELRVKFSRSADAPAYKQGQNQLYNELNLGRREEYDVLDKRRGRDPEMGGKPRRKNPQEGLYNELQKDKMAEAYSEIGMKGERRRGKGHDGLYQGLSTATKDTYDALHMQALPPR

SEQ ID NO: 1452 - protein, 251 aa, Artificial Sequence
  source: /note="Description of Artificial Sequence: Synthetic polypeptide"
QVQLVQSGGGLVQPGGSLRLSCAASGFTFSSYWMHWVRQAPGKGLVWVSRINSDGSSTSYADSVKGRFTISRDNAKNTLYLQMNSLRAEDTAVYYCVRTGWVGSYYYYMDVWGKGTTVTVSSGGGGSGGGGSGGGGSGGGGSEIVLTQSPGTLSLSPGERATLSCRASQSVSSNYLAWYQQKPGQPPRLLIYDVSTRATGIPARFSGGGSGTDFTLTISSLEPEDFAVYYCQQRSNWPPWTFGQGTKVEIK

SEQ ID NO: 1453 - protein, 495 aa, Artificial Sequence
  source: /note="Description of Artificial Sequence: Synthetic polypeptide"
MALPVTALLLPLALLLHAARPQVQLVQSGGGLVQPGGSLRLSCAASGFTFSSYWMHWVRQAPGKGLVWVSRINSDGSSTSYADSVKGRFTISRDNAKNTLYLQMNSLRAEDTAVYYCVRTGWVGSYYYYMDVWGKGTTVTVSSGGGGSGGGGSGGGGSGGGGSEIVLTQSPGTLSLSPGERATLSCRASQSVSSNYLAWYQQKPGQPPRLLIYDVSTRATGIPARFSGGGSGTDFTLTISSLEPEDFAVYYCQQRSNWPPWTFGQGTKVEIKTTTPAPRPPTPAPTIASQPLSLRPEACRPAAGGAVHTRGLDFACDIYIWAPLAGTCGVLLLSLVITLYCKRGRKKLLYIFKQPFMRPVQTTQEEDGCSCRFPEEEEGGCELRVKFSRSADAPAYKQGQNQLYNELNLGRREEYDVLDKRRGRDPEMGGKPRRKNPQEGLYNELQKDKMAEAYSEIGMKGERRRGKGHDGLYQGLSTATKDTYDALHMQALPPR

SEQ ID NO: 1454 - protein, 250 aa, Artificial Sequence
  source: /note="Description of Artificial Sequence: Synthetic polypeptide"
QVQLVQSGGGVVQPGRSLRLSCAASGFTFSSYGMHWVRQAPGKGLEWVAVISYDGSNKYYADSVKGRFTISRDNSKNTLYLQMNSLRAEDTAVYYCAKGYSRYYYYGMDVWGQGTTVTVSSGGGGSGGGGSGGGGSGGGGSEIVMTQSPATLSLSPGERAILSCRASQSVYTKYLGWYQQKPGQAPRLLIYDASTRATGIPDRFSGSGSGTDFTLTINRLEPEDFAVYYCQHYGGSPLITFGQGTKVDIK

SEQ ID NO: 1455 - protein, 494 aa, Artificial Sequence
  source: /note="Description of Artificial Sequence: Synthetic polypeptide"
MALPVTALLLPLALLLHAARPQVQLVQSGGGVVQPGRSLRLSCAASGFTFSSYGMHWVRQAPGKGLEWVAVISYDGSNKYYADSVKGRFTISRDNSKNTLYLQMNSLRAEDTAVYYCAKGYSRYYYYGMDVWGQGTTVTVSSGGGGSGGGGSGGGGSGGGGSEIVMTQSPATLSLSPGERAILSCRASQSVYTKYLGWYQQKPGQAPRLLIYDASTRATGIPDRFSGSGSGTDFTLTINRLEPEDFAVYYCQHYGGSPLITFGQGTKVDIKTTTPAPRPPTPAPTIASQPLSLRPEACRPAAGGAVHTRGLDFACDIYIWAPLAGTCGVLLLSLVITLYCKRGRKKLLYIFKQPFMRPVQTTQEEDGCSCRFPEEEEGGCELRVKFSRSADAPAYKQGQNQLYNELNLGRREEYDVLDKRRGRDPEMGGKPRRKNPQEGLYNELQKDKMAEAYSEIGMKGERRRGKGHDGLYQGLSTATKDTYDALHMQALPPR

SEQ ID NO: 1456 - protein, 249 aa, Artificial Sequence
  source: /note="Description of Artificial Sequence: Synthetic polypeptide"
QVQLVQSGGGLVQPGGSLRLSCAASGFTFSSYAMSWVRQAPGKGLEWVSAISGSGGSTYYADSVKGRFTISRDNSKNTLYLQMNSLRAEDTAVYYCAKREAAAGHDWYFDLWGRGTLVTVSSGGGGSGGGGSGGGGSGGGGSDIRVTQSPSSLSASVGDRVTITCRASQSISSYLNWYQQKPGKAPKLLIYAASSLQSGVPSRFSGSGSGTDFTLTISSLQPEDFATYYCQQSYSIPLTFGQGTKVEIK

SEQ ID NO: 1457 - protein, 493 aa, Artificial Sequence
  source: /note="Description of Artificial Sequence: Synthetic polypeptide"
MALPVTALLLPLALLLHAARPQVQLVQSGGGLVQPGGSLRLSCAASGFTFSSYAMSWVRQAPGKGLEWVSAISGSGGSTYYADSVKGRFTISRDNSKNTLYLQMNSLRAEDTAVYYCAKREAAAGHDWYFDLWGRGTLVTVSSGGGGSGGGGSGGGGSGGGGSDIRVTQSPSSLSASVGDRVTITCRASQSISSYLNWYQQKPGKAPKLLIYAASSLQSGVPSRFSGSGSGTDFTLTISSLQPEDFATYYCQQSYSIPLTFGQGTKVEIKTTTPAPRPPTPAPTIASQPLSLRPEACRPAAGGAVHTRGLDFACDIYIWAPLAGTCGVLLLSLVITLYCKRGRKKLLYIFKQPFMRPVQTTQEEDGCSCRFPEEEEGGCELRVKFSRSADAPAYKQGQNQLYNELNLGRREEYDVLDKRRGRDPEMGGKPRRKNPQEGLYNELQKDKMAEAYSEIGMKGERRRGKGHDGLYQGLSTATKDTYDALHMQALPPR

SEQ ID NO: 1458 - protein, 247 aa, Artificial Sequence
  source: /note="Description of Artificial Sequence: Synthetic polypeptide"
QVQLVQSWAEVKKPGASVKVSCKASGYTFTSYYMHWVRQAPGQGLEWMGIINPSGGSTSYAQKFQGRVTMTRDTSTSTVYMELSNLRSEDTAVYYCARSPRVTTGYFDYWGQGTLVTVSSGGGGSGGGGSGGGGSGGGGSDIQLTQSPSTLSASVGDRVTITCRASQSISSWLAWYQQKPGKAPKLLIYKASSLESGVPSRFSGSGSGTEFTLTISSLQPDDFATYYCQQYSSYPLTFGGGTRLEIK

SEQ ID NO: 1459 - protein, 491 aa, Artificial Sequence
  source: /note="Description of Artificial Sequence: Synthetic polypeptide"
MALPVTALLLPLALLLHAARPQVQLVQSWAEVKKPGASVKVSCKASGYTFTSYYMHWVRQAPGQGLEWMGIINPSGGSTSYAQKFQGRVTMTRDTSTSTVYMELSNLRSEDTAVYYCARSPRVTTGYFDYWGQGTLVTVSSGGGGSGGGGSGGGGSGGGGSDIQLTQSPSTLSASVGDRVTITCRASQSISSWLAWYQQKPGKAPKLLIYKASSLESGVPSRFSGSGSGTEFTLTISSLQPDDFATYYCQQYSSYPLTFGGGTRLEIKTTTPAPRPPTPAPTIASQPLSLRPEACRPAAGGAVHTRGLDFACDIYIWAPLAGTCGVLLLSLVITLYCKRGRKKLLYIFKQPFMRPVQTTQEEDGCSCRFPEEEEGGCELRVKFSRSADAPAYKQGQNQLYNELNLGRREEYDVLDKRRGRDPEMGGKPRRKNPQEGLYNELQKDKMAEAYSEIGMKGERRRGKGHDGLYQGLSTATKDTYDALHMQALPPR

SEQ ID NO: 1460 - protein, 253 aa, Artificial Sequence
  source: /note="Description of Artificial Sequence: Synthetic polypeptide"
QVQLVQSGAEVRRPGASVKISCRASGDTSTRHYIHWLRQAPGQGPEWMGVINPTTGPATGSPAYAQMLQGRVTMTRDTSTRTVYMELRSLRFEDTAVYYCARSVVGRSAPYYFDYWGQGTLVTVSSGGGGSGGGGSGGGGSGGGGSDIQMTQSPSSLSASVGDRVTITCRASQGISDYSAWYQQKPGKAPKLLIYAASTLQSGVPSRFSGSGSGTDFTLTISYLQSEDFATYYCQQYYSYPLTFGGGTKVDIK

SEQ ID NO: 1461 - protein, 497 aa, Artificial Sequence
  source: /note="Description of Artificial Sequence: Synthetic polypeptide"
MALPVTALLLPLALLLHAARPQVQLVQSGAEVRRPGASVKISCRASGDTSTRHYIHWLRQAPGQGPEWMGVINPTTGPATGSPAYAQMLQGRVTMTRDTSTRTVYMELRSLRFEDTAVYYCARSVVGRSAPYYFDYWGQGTLVTVSSGGGGSGGGGSGGGGSGGGGSDIQMTQSPSSLSASVGDRVTITCRASQGISDYSAWYQQKPGKAPKLLIYAASTLQSGVPSRFSGSGSGTDFTLTISYLQSEDFATYYCQQYYSYPLTFGGGTKVDIKTTTPAPRPPTPAPTIASQPLSLRPEACRPAAGGAVHTRGLDFACDIYIWAPLAGTCGVLLLSLVITLYCKRGRKKLLYIFKQPFMRPVQTTQEEDGCSCRFPEEEEGGCELRVKFSRSADAPAYKQGQNQLYNELNLGRREEYDVLDKRRGRDPEMGGKPRRKNPQEGLYNELQKDKMAEAYSEIGMKGERRRGKGHDGLYQGLSTATKDTYDALHMQALPPR

SEQ ID NO: 1462 - protein, 249 aa, Artificial Sequence
  source: /note="Description of Artificial Sequence: Synthetic polypeptide"
QVQLQQSGAEVKKPGASVKVSCKASGYTFTNYYMHWVRQAPGQGLEWMGIINPSGGYTTYAQKFQGRLTMTRDTSTSTVYMELSSLRSEDTAVYYCARIRSCGGDCYYFDNWGQGTLVTVSSGGGGSGGGGSGGGGSGGGGSDIQLTQSPSTLSASVGDRVTITCRASENVNIWLAWYQQKPGKAPKLLIYKSSSLASGVPSRFSGSGSGAEFTLTISSLQPDDFATYYCQQYQSYPLTFGGGTKVDIK

SEQ ID NO: 1463 - protein, 493 aa, Artificial Sequence
  source: /note="Description of Artificial Sequence: Synthetic polypeptide"
MALPVTALLLPLALLLHAARPQVQLQQSGAEVKKPGASVKVSCKASGYTFTNYYMHWVRQAPGQGLEWMGIINPSGGYTTYAQKFQGRLTMTRDTSTSTVYMELSSLRSEDTAVYYCARIRSCGGDCYYFDNWGQGTLVTVSSGGGGSGGGGSGGGGSGGGGSDIQLTQSPSTLSASVGDRVTITCRASENVNIWLAWYQQKPGKAPKLLIYKSSSLASGVPSRFSGSGSGAEFTLTISSLQPDDFATYYCQQYQSYPLTFGGGTKVDIKTTTPAPRPPTPAPTIASQPLSLRPEACRPAAGGAVHTRGLDFACDIYIWAPLAGTCGVLLLSLVITLYCKRGRKKLLYIFKQPFMRPVQTTQEEDGCSCRFPEEEEGGCELRVKFSRSADAPAYKQGQNQLYNELNLGRREEYDVLDKRRGRDPEMGGKPRRKNPQEGLYNELQKDKMAEAYSEIGMKGERRRGKGHDGLYQGLSTATKDTYDALHMQALPPR

SEQ ID NO: 1464 - protein, 246 aa, Artificial Sequence
  source: /note="Description of Artificial Sequence: Synthetic polypeptide"
QITLKESGPALVKPTQTLTLTCTFSGFSLSTAGVHVGWIRQPPGKALEWLALISWADDKRYRPSLRSRLDITRVTSKDQVVLSMTNMQPEDTATYYCALQGFDGYEANWGPGTLVTVSSGGGGSGGGGSGGGGSGGGGSDIVMTQSPSSLSASAGDRVTITCRASRGISSALAWYQQKPGKPPKLLIYDASSLESGVPSRFSGSGSGTDFTLTIDSLEPEDFATYYCQQSYSTPWTFGQGTKVDIK

SEQ ID NO: 1465 - protein, 490 aa, Artificial Sequence
  source: /note="Description of Artificial Sequence: Synthetic polypeptide"
MALPVTALLLPLALLLHAARPQITLKESGPALVKPTQTLTLTCTFSGFSLSTAGVHVGWIRQPPGKALEWLALISWADDKRYRPSLRSRLDITRVTSKDQVVLSMTNMQPEDTATYYCALQGFDGYEANWGPGTLVTVSSGGGGSGGGGSGGGGSGGGGSDIVMTQSPSSLSASAGDRVTITCRASRGISSALAWYQQKPGKPPKLLIYDASSLESGVPSRFSGSGSGTDFTLTIDSLEPEDFATYYCQQSYSTPWTFGQGTKVDIKTTTPAPRPPTPAPTIASQPLSLRPEACRPAAGGAVHTRGLDFACDIYIWAPLAGTCGVLLLSLVITLYCKRGRKKLLYIFKQPFMRPVQTTQEEDGCSCRFPEEEEGGCELRVKFSRSADAPAYKQGQNQLYNELNLGRREEYDVLDKRRGRDPEMGGKPRRKNPQEGLYNELQKDKMAEAYSEIGMKGERRRGKGHDGLYQGLSTATKDTYDALHMQALPPR

SEQ ID NO: 1466 - protein, 239 aa, Artificial Sequence
  source: /note="Description of Artificial Sequence: Synthetic polypeptide"
QVQLQQSGPELEKPGASVKISCKASGYSFTGYTMNWVKQSHGKSLEWIGLITPYNGASSYNQKFRGKATLTVDKSSSTAYMDLLSLTSEDSAVYFCARGGYDGRGFDYWGQGTTVTVSSGGGGSGGGGSGGGGSDIELTQSPAIMSASPGEKVTMTCSASSSVSYMHWYQQKSGTSPKRWIYDTSKLASGVPGRFSGSGSGNSYSLTISSVEAEDDATYYCQQWSGYPLTFGAGTKLEI

SEQ ID NO: 1467 - protein, 383 aa, Artificial Sequence
  source: /note="Description of Artificial Sequence: Synthetic polypeptide"
MALPVTALLLPLALLLHAARPQVQLQQSGPELEKPGASVKISCKASGYSFTGYTMNWVKQSHGKSLEWIGLITPYNGASSYNQKFRGKATLTVDKSSSTAYMDLLSLTSEDSAVYFCARGGYDGRGFDYWGQGTTVTVSSGGGGSGGGGSGGGGSDIELTQSPAIMSASPGEKVTMTCSASSSVSYMHWYQQKSGTSPKRWIYDTSKLASGVPGRFSGSGSGNSYSLTISSVEAEDDATYYCQQWSGYPLTFGAGTKLEITTTPAPRPPTPAPTIASQPLSLRPEACRPAAGGAVHTRGLDFACDIYIWAPLAGTCGVLLLSLVITLYCKRGRKKLLYIFKQPFMRPVQTTQEEDGCSCRFPEEEEGGCELRVKFSRSADAPA

SEQ ID NO: 1468 - DNA, 2000 bp, Artificial Sequence
  source: /note="Description of Artificial Sequence: Synthetic polynucleotide"
  misc_feature (1)..(2000): /note="This sequence may encompass 50-2000 nucleotides"
aaaaaaaaaaaaaaaaaaaaaaaaaaaaaaaaaaaaaaaaaaaaaaaaaaaaaaaaaaaaaaaaaaaaaaaaaaaaaaaaaaaaaaaaaaaaaaaaaaaaaaaaaaaaaaaaaaaaaaaaaaaaaaaaaaaaaaaaaaaaaaaaaaaaaaaaaaaaaaaaaaaaaaaaaaaaaaaaaaaaaaaaaaaaaaaaaaaaaaaaaaaaaaaaaaaaaaaaaaaaaaaaaaaaaaaaaaaaaaaaaaaaaaaaaaaaaaaaaaaaaaaaaaaaaaaaaaaaaaaaaaaaaaaaaaaaaaaaaaaaaaaaaaaaaaaaaaaaaaaaaaaaaaaaaaaaaaaaaaaaaaaaaaaaaaaaaaaaaaaaaaaaaaaaaaaaaaaaaaaaaaaaaaaaaaaaaaaaaaaaaaaaaaaaaaaaaaaaaaaaaaaaaaaaaaaaaaaaaaaaaaaaaaaaaaaaaaaaaaaaaaaaaaaaaaaaaaaaaaaaaaaaaaaaaaaaaaaaaaaaaaaaaaaaaaaaaaaaaaaaaaaaaaaaaaaaaaaaaaaaaaaaaaaaaaaaaaaaaaaaaaaaaaaaaaaaaaaaaaaaaaaaaaaaaaaaaaaaaaaaaaaaaaaaaaaaaaaaaaaaaaaaaaaaaaaaaaaaaaaaaaaaaaaaaaaaaaaaaaaaaaaaaaaaaaaaaaaaaaaaaaaaaaaaaaaaaaaaaaaaaaaaaaaaaaaaaaaaaaaaaaaaaaaaaaaaaaaaaaaaaaaaaaaaaaaaaaaaaaaaaaaaaaaaaaaaaaaaaaaaaaaaaaaaaaaaaaaaaaaaaaaaaaaaaaaaaaaaaaaaaaaaaaaaaaaaaaaaaaaaaaaaaaaaaaaaaaaaaaaaaaaaaaaaaaaaaaaaaaaaaaaaaaaaaaaaaaaaaaaaaaaaaaaaaaaaaaaaaaaaaaaaaaaaaaaaaaaaaaaaaaaaaaaaaaaaaaaaaaaaaaaaaaaaaaaaaaaaaaaaaaaaaaaaaaaaaaaaaaaaaaaaaaaaaaaaaaaaaaaaaaaaaaaaaaaaaaaaaaaaaaaaaaaaaaaaaaaaaaaaaaaaaaaaaaaaaaaaaaaaaaaaaaaaaaaaaaaaaaaaaaaaaaaaaaaaaaaaaaaaaaaaaaaaaaaaaaaaaaaaaaaaaaaaaaaaaaaaaaaaaaaaaaaaaaaaaaaaaaaaaaaaaaaaaaaaaaaaaaaaaaaaaaaaaaaaaaaaaaaaaaaaaaaaaaaaaaaaaaaaaaaaaaaaaaaaaaaaaaaaaaaaaaaaaaaaaaaaaaaaaaaaaaaaaaaaaaaaaaaaaaaaaaaaaaaaaaaaaaaaaaaaaaaaaaaaaaaaaaaaaaaaaaaaaaaaaaaaaaaaaaaaaaaaaaaaaaaaaaaaaaaaaaaaaaaaaaaaaaaaaaaaaaaaaaaaaaaaaaaaaaaaaaaaaaaaaaaaaaaaaaaaaaaaaaaaaaaaaaaaaaaaaaaaaaaaaaaaaaaaaaaaaaaaaaaaaaaaaaaaaaaaaaaaaaaaaaaaaaaaaaaaaaaaaaaaaaaaaaaaaaaaaaaaaaaaaaaaaaaaaaaaaaaaaaaaaaaaaaaaaaaaaaaaaaaaaaaaaaaaaaaaaaaaaaaaaaaaaaaaaaaaaaaaaaaaaaaaaaaaaaaaaaaaaaaaaaaaaaaaaaaaaaaaaaaaaaaaaaaaaaaaaaaaaaaaaaaaaaaaaaaaaaaaaaaaaaaaaaaaaaaaaaaaaaaaaaaaaaaaaaaaaaaaaaaaaaaaaaaaaaaaaaaaaaaaaaaaaaaaaaaaaaaaaaaaaaaaaaaaaaaaaaaaaaaaaaaaaaaaaaaaaaaaaaaaaaaaaaaaaaaaaaaaaaaaaaaaaaaaaaaaaaaaaaaaaaaaaaaaaaaaaaaaaaaaaaaaaaaaaaaaaaaaaaaaaaaaaaaaaaaaaaaaaaaaaaaaaaaaaaaaaaaaaaaaaaaaaaaaaaaaaaaaaaaaaaaaaaaaaaaaaaaaaaaaaaaaaaaa

SEQ ID NO: 1469 - DNA, 100 bp, Artificial Sequence
  source: /note="Description of Artificial Sequence: Synthetic polynucleotide"
tttttttttttttttttttttttttttttttttttttttttttttttttttttttttttttttttttttttttttttttttttttttttttttttttttt

SEQ ID NO: 1470 - DNA, 5000 bp, Artificial Sequence
  source: /note="Description of Artificial Sequence: Synthetic polynucleotide"
  misc_feature (1)..(5000): /note="This sequence may encompass 50-5000 nucleotides"
tttttttttttttttttttttttttttttttttttttttttttttttttttttttttttttttttttttttttttttttttttttttttttttttttttttttttttttttttttttttttttttttttttttttttttttttttttttttttttttttttttttttttttttttttttttttttttttttttttttttttttttttttttttttttttttttttttttttttttttttttttttttttttttttttttttttttttttttttttttttttttttttttttttttttttttttttttttttttttttttttttttttttttttttttttttttttttttttttttttttttttttttttttttttttttttttttttttttttttttttttttttttttttttttttttttttttttttttttttttttttttttttttttttttttttttttttttttttttttttttttttttttttttttttttttttttttttttttttttttttttttttttttttttttttttttttttttttttttttttttttttttttttttttttttttttttttttttttttttttttttttttttttttttttttttttttttttttttttttttttttttttttttttttttttttttttttttttttttttttttttttttttttttttttttttttttttttttttttttttttttttttttttttttttttttttttttttttttttttttttttttttttttttttttttttttttttttttttttttttttttttttttttttttttttttttttttttttttttttttttttttttttttttttttttttttttttttttttttttttttttttttttttttttttttttttttttttttttttttttttttttttttttttttttttttttttttttttttttttttttttttttttttttttttttttttttttttttttttttttttttttttttttttttttttttttttttttttttttttttttttttttttttttttttttttttttttttttttttttttttttttttttttttttttttttttttttttttttttttttttttttttttttttttttttttttttttttttttttttttttttttttttttttttttttttttttttttttttttttttttttttttttttttttttttttttttttttttttttttttttttttttttttttttttttttttttttttttttttttttttttttttttttttttttttttttttttttttttttttttttttttttttttttttttttttttttttttttttttttttttttttttttttttttttttttttttttttttttttttttttttttttttttttttttttttttttttttttttttttttttttttttttttttttttttttttttttttttttttttttttttttttttttttttttttttttttttttttttttttttttttttttttttttttttttttttttttttttttttttttttttttttttttttttttttttttttttttttttttttttttttttttttttttttttttttttttttttttttttttttttttttttttttttttttttttttttttttttttttttttttttttttttttttttttttttttttttttttttttttttttttttttttttttttttttttttttttttttttttttttttttttttttttttttttttttttttttttttttttttttttttttttttttttttttttttttttttttttttttttttttttttttttttttttttttttttttttttttttttttttttttttttttttttttttttttttttttttttttttttttttttttttttttttttttttttttttttttttttttttttttttttttttttttttttttttttttttttttttttttttttttttttttttttttttttttttttttttttttttttttttttttttttttttttttttttttttttttttttttttttttttttttttttttttttttttttttttttttttttttttttttttttttttttttttttttttttttttttttttttttttttttttttttttttttttttttttttttttttttttttttttttttttttttttttttttttttttttttttttttttttttttttttttttttttttttttttttttttttttttttttttttttttttttttttttttttttttttttttttttttttttttttttttttttttttttttttttttttttttttttttttttttttttttttttttttttttttttttttttttttttttttttttttttttttttttttttttttttttttttttttttttttttttttttttttttttttttttttttttttttttttttttttttttttttttttttttttttttttttttttttttttttttttttttttttttttttttttttttttttttttttttttttttttttttttttttttttttttttttttttttttttttttttttttttttttttttttttttttttttttttttttttttttttttttttttttttttttttttttttttttttttttttttttttttttttttttttttttttttttttttttttttttttttttttttttttttttttttttttttttttttttttttttttttttttttttttttttttttttttttttttttttttttttttttttttttttttttttttttttttttttttttttttttttttttttttttttttttttttttttttttttttttttttttttttttttttttttttttttttttttttttttttttttttttttttttttttttttttttttttttttttttttttttttttttttttttttttttttttttttttttttttttttttttttttttttttttttttttttttttttttttttttttttttttttttttttttttttttttttttttttttttttttttttttttttttttttttttttttttttttttttttttttttttttttttttttttttttttttttttttttttttttttttttttttttttttttttttttttttttttttttttttttttttttttttttttttttttttttttttttttttttttttttttttttttttttttttttttttttttttttttttttttttttttttttttttttttttttttttttttttttttttttttttttttttttttttttttttttttttttttttttttttttttttttttttttttttttttttttttttttttttttttttttttttttttttttttttttttttttttttttttttttttttttttttttttttttttttttttttttttttttttttttttttttttttttttttttttttttttttttttttttttttttttttttttttttttttttttttttttttttttttttttttttttttttttttttttttttttttttttttttttttttttttttttttttttttttttttttttttttttttttttttttttttttttttttttttttttttttttttttttttttttttttttttttttttttttttttttttttttttttttttttttttttttttttttttttttttttttttttttttttttttttttttttttttttttttttttttttttttttttttttttttttttttttttttttttttttttttttttttttttttttttttttttttttttttttttttttttttttttttttttttttttttttttttttttttttttttttttttttttttttttttttttttttttttttttttttttttttttttttttttttttttttttttttttttttttttttttttttttttttttttttttttttttttttttttttttttttttttttttttttttttttttttttttttttttttttttttttttttttttttttttttttttttttttttttttttttttttttttttttttttttttttttttttttttttttttttttttttttttttttttttttttttttttttttttttttttttttttttttttttttttttttttttttttttttttttttttttttttttttttttttttttttttttttttttttttttttttttttttttttttttttttttttttttttttttttttttttttttttttttttttttttttttttttttttttttttttttttttttttttttttttttttttttttttttttttttttttttttttttttttttttttttttttttttttttttttttttttttttttttttttttttttttttttttttttttttttttttttttttttttttttttttttttttttttttttttttttttttttttttttttttttttttttttttttttttttttttttttttttttttttttttttttttttttttttttttttttttttttttttttttttttttttttttttttttttttttttttttttttttttttttttttttttttttttttttttttttttttttttttttttttttttttttttttttttttttttttttttttttttttttttttttttttttttttttttttttttttttttttttttttttttttttttttttttttttttttttttttttttttttttttttttttttttttttttttttttttttttttttttttttttttttttttttttttttttttttttttttttttttttttttttttttttttttttttttttttttttttttttttttttttttttttttttttttttttttttttttttttttttttttttttttttttttttttttttttttttt

SEQ ID NO: 1471 - DNA, 5000 bp, Artificial Sequence; identical to SEQ ID NO: 1013
  source: /note="Description of Artificial Sequence: Synthetic polynucleotide"
  misc_feature (1)..(5000): /note="This sequence may encompass 100-5000 nucleotides"

SEQ ID NO: 1472 - DNA, 400 bp, Artificial Sequence
  source: /note="Description of Artificial Sequence: Synthetic polynucleotide"
  misc_feature (1)..(400): /note="This sequence may encompass 100-400 nucleotides"
  source: /note="See specification as filed for detailed description of substitutions and preferred embodiments"
aaaaaaaaaaaaaaaaaaaaaaaaaaaaaaaaaaaaaaaaaaaaaaaaaaaaaaaaaaaaaaaaaaaaaaaaaaaaaaaaaaaaaaaaaaaaaaaaaaaaaaaaaaaaaaaaaaaaaaaaaaaaaaaaaaaaaaaaaaaaaaaaaaaaaaaaaaaaaaaaaaaaaaaaaaaaaaaaaaaaaaaaaaaaaaaaaaaaaaaaaaaaaaaaaaaaaaaaaaaaaaaaaaaaaaaaaaaaaaaaaaaaaaaaaaaaaaaaaaaaaaaaaaaaaaaaaaaaaaaaaaaaaaaaaaaaaaaaaaaaaaaaaaaaaaaaaaaaaaaaaaaaaaaaaaaaaaaaaaaaaaaaaaaaaaaaaaaaaaaaaaaaaaaaaaaaaaaaaaaaaaaaaaaaaaaaaaaaaaaa

SEQ ID NO: 1473 - DNA, 521 bp, Unknown
  source: /note="Description of Unknown: PGK promoter sequence"
acccctctctccagccactaagccagttgctccctcggctgacggctgcacgcgaggcctccgaacgtcttacgccttgtggcgcgcccgtccttgtcccgggtgtgatggcggggtgtggggcggagggcgtggcggggaagggccggcgacgagagccgcgcgggacgactcgtcggcgataaccggtgtcgggtagcgccagccgcgcgacggtaacgagggaccgcgacaggcagacgctcccatgatcactctgcacgccgaaggcaaatagtgcaggccgtgcggcgcttggcgttccttggaagggctgaatccccgcctcgtccttcgcagcggccccccgggtgttcccatcgccgcttctaggcccactgcgacgcttgcctgcacttcttacacgctctgggtcccagccgcggcgacgcaaagggccttggtgcgggtctcgtcggcgcagggacgcgtttgggtcccgacggaaccttttccgcgttggggttggggcaccataagct

SEQ ID NO: 1474 - DNA, 118 bp, Artificial Sequence
  source: /note="Description of Artificial Sequence: Synthetic polynucleotide"
acccctctctccagccactaagccagttgctccctcggctgacggctgcacgcgaggcctccgaacgtcttacgccttgtggcgcgcccgtccttgtcccgggtgtgatggcggggtg

SEQ ID NO: 1475 - DNA, 221 bp, Artificial Sequence
  source: /note="Description of Artificial Sequence: Synthetic polynucleotide"
acccctctctccagccactaagccagttgctccctcggctgacggctgcacgcgaggcctccgaacgtcttacgccttgtggcgcgcccgtccttgtcccgggtgtgatggcggggtgtggggcggagggcgtggcggggaagggccggcgacgagagccgcgcgggacgactcgtcggcgataaccggtgtcgggtagcgccagccgcgcgacggtaacg

SEQ ID NO: 1476 - DNA, 324 bp, Artificial Sequence
  source: /note="Description of Artificial Sequence: Synthetic polynucleotide"
acccctctctccagccactaagccagttgctccctcggctgacggctgcacgcgaggcctccgaacgtcttacgccttgtggcgcgcccgtccttgtcccgggtgtgatggcggggtgtggggcggagggcgtggcggggaagggccggcgacgagagccgcgcgggacgactcgtcggcgataaccggtgtcgggtagcgccagccgcgcgacggtaacgagggaccgcgacaggcagacgctcccatgatcactctgcacgccgaaggcaaatagtgcaggccgtgcggcgcttggcgttccttggaagggctgaatccccg

SEQ ID NO: 1477 - DNA, 422 bp, Artificial Sequence
  source: /note="Description of Artificial Sequence: Synthetic polynucleotide"
acccctctctccagccactaagccagttgctccctcggctgacggctgcacgcgaggcctccgaacgtcttacgccttgtggcgcgcccgtccttgtcccgggtgtgatggcggggtgtggggcggagggcgtggcggggaagggccggcgacgagagccgcgcgggacgactcgtcggcgataaccggtgtcgggtagcgccagccgcgcgacggtaacgagggaccgcgacaggcagacgctcccatgatcactctgcacgccgaaggcaaatagtgcaggccgtgcggcgcttggcgttccttggaagggctgaatccccgcctcgtccttcgcagcggccccccgggtgttcccatcgccgcttctaggcccactgcgacgcttgcctgcacttcttacacgctctgggtcccagccg

SEQ ID NO: 1478 - protein, 21 aa, Artificial Sequence
  source: /note="Description of Artificial Sequence: Synthetic peptide"
  SITE (1)..(3): /note="This region may or may not be present"
GSGEGRGSLLTCGDVEENPGP

SEQ ID NO: 1479 - protein, 22 aa, Artificial Sequence
  source: /note="Description of Artificial Sequence: Synthetic peptide"
  SITE (1)..(3): /note="This region may or may not be present"
GSGATNFSLLKQAGDVEENPGP

SEQ ID NO: 1480 - protein, 23 aa, Artificial Sequence
  source: /note="Description of Artificial Sequence: Synthetic peptide"
  SITE (1)..(3): /note="This region may or may not be present"
GSGQCTNYALLKLAGDVESNPGP

SEQ ID NO: 1481 - protein, 25 aa, Artificial Sequence
  source: /note="Description of Artificial Sequence: Synthetic peptide"
  SITE (1)..(3): /note="This region may or may not be present"
GSGVKQTLNFDLLKLAGDVESNPGP

SEQ ID NO: 1482 - protein, 4 aa, Artificial Sequence
  source: /note="Description of Artificial Sequence: Synthetic peptide"
RGDS
